United States Patent Application Publication US 2026/0275333 A1 - sequence listing, part 30

SEQ ID NO: 3045 - RNA, 64444167 nt, Homo sapiens (residues 62,296,032-64,444,167 of 64,444,167)
  source 1..64444167: mol_type = mRNA
caaaagcggctgtgtgtcgaggttattttaactttttactactttttgttactgtttctgcaaatgctaacacataaaccatgacctaacttttgtcaccttggatatctattgaatgttaaacatctctaataaagatggccaccacttaatgtgtggaaagtgatggccttctcgtgggccacgcgtttgggtgtgagtatggccttgaccaagggtcttggtgctttattcacttttagagatagggtcagttgcccaggctcgagtgcagtggtgcagtcatagctcactgcagcctcgacatcctgggctcaagcagtcctccagcctcagcctcccaagtagctaggaccataggcacatgccaccaaacccagctatttttttaaaacaattttgtagagacaggatctcactgtgttgcccaagctggtcttgaactcctgggctcaagcaatcctcctgcctcagcctcccaaagtgctgggattacaggtgtgagccactgtgccaggcccttggttcttttaaaaaattaatcctgtcatgtaggatgtccttacagaatgaaaaacctagcaagcttattccccaacagaacctaataccttggttggattctattgctaattgaaatgagaattcggttctatggtcattggttcagggtgtatgtattgtgagctgctggagacagaacggtgaacaggcatgcctcccggagagccatatgcaaagcacggagagccacatgcaaagcacgtgttggcaacatagcacatgctgctgctcaccaggctcacctgggatgacggtgtggatctgagtcgctggccacgtggcgacgtctgccctgccctagtgtccaaggacggtgaagggtcgggtgtcaccaacacctgcagccttctcaccgggcgaggcttgggttgtgggaagtgggggacagctggccctggtccccagccctgatggacatccggcattttgctggtgcaggctgtcctgaagccagaccctcccgagactgctgtctgggaggagagcgagccagcggcccagatgccttggtcgtggggaggtgcctgtgtgtaccgtgagtttcccagcctccggcggcaagtgggaaagccggtacaggaagagtggtgcctgcaggtgctcccggtcaccaccaccccttccagacgccatccccagagctcacatctgtgctggctggagggtcagggctccactctgcccgacaagcagtctggtgcaggggacgcaaatgtcagacccagcagggcccggcacttggagaagtgccacatgccaccctggtggcctccgggcaccccactgtccacgtgtctgagcatggagctgtccatctggggcattggccttgaacaccaaggacctgccccggtttgccaggcacatctgaacacaaggtcaggaggttagaacaggacaagagaaacgcctggaggcctcctcacaaggcatcctgctctttggggaaaatttctccccagcagaaatggggatttacaagttttacaggtccttgtcatttccgtgaaggaaaacaaagcaaagacagttacgagttctggtgagcttcccactgagctgggcgacagagttcaggtctccaagtgccgggccctgctgggtgtgacatttgcgtcccctgcaccagactgcttgtcgggcagagtggagccctgaccctccagccagcacagatgtggacgaggggcgcagctggaccccagaggagagttcgatccatctgcaggaagtcctgatggtcccagttttctttgatggccacatctggacttgcctgtgtgtaaagtggacacaaaagacggggcccctgccgtggccgagaacgtggcggtggctcctgctgcttgccaggcagcacgggagctgggtctccctcggacccctcaaaagatggttcctcaccgtcttctacaggctgatgtaaaatttctgtgaggcgaaagccacatttgccagctctgggtacgaagttcacttcacagtcggtccttcgcttggtgagctttgggagccaggctgccgtggccagatgtttaggagcacgacggtggctctgcagagggcgatggtgtgcagccgggctttcctgtcgcccacaccttgcaggccctcacccctccccgtgccttcacccagctcctcctccagtgccattcatcccagcaggcagcaaggacatggcagctgagaaaagatgccagcagaacgcacttattttataatatttaacaactgtcagtgccaaactgcattaacacagtcatcctcagatttttcagagggctgtgtacacatctgtgaaaataaatgttaacctctaagatttgaatgaagattctctgaagatgggcagcaggtgacctttgttttacactgagcaatttttcaccatctcagccgctctggccattttgaaaagggctacaaatctgctaaggatgagtcctcatgcctggttatcagaagtttggaccgcgtgttcctgaggattggccaagcaaatggctcatttccaaaaactgccctgtggagagggggctgggggacactcgtgacacctgtcgggcggcacatgtgatgggtggagcacccaggttctccaagcagcaggaggctctgatggacccccctcccctggcggggggacgctactgctagaagcagcgaagggcccggtgccccaggtttcagctgcctgccttctgccgtaagttgccccagcaccttcgtgcttttcaggagcgtaagctgagcagactcagtcgtcccagtggtcagtgtggctggggcagagggacacacggtccacaagacgtccatgctctcggaatgctccaggggtttggctgtggggctccaccaccattgcctgagcccggagccagaggctcctcccacactgcctggtctgccccacagagcatcagtgccacgccaggtgaggacagcgctcaccagacaaccaggcctgccgccccactgacgctgacttccggacctgcagaactgtgagaaagtacgtttcgcttctttgtaaactgcctggtcagtggtggcagcacagatggaccgacgtggacctcgacgcgaatggcgggctctgggcgctgacccggtggcggcgtagctcaccgaacacccagggggaccagaactctctgccttccactcagttgtgacttgtctatttttaaaatgttaaaaaaaaaaaaaacccacaaggtgcagtggctcacacctgtaatcccagcctttgggaggttgaggcgggtggatcgctcaagctcaggagttcgagaccaacctggcccacatggtgaaaccctgtctctaataaaaatacaaaaattaaccgggtctggtgacacatgcctgtaatcccagctactcaggaggctgaggtaggagaactgcttgaactcaggaggcgggggctgcaatgagctgagatcaagccactgcactccagcctatgggatagagtgagattccatctcaaaaaaaaaaaaaaaaaaaaaaaagtttaaaaaaccctacccctgccaaatgcttttccgaagtagccgtgccattggtgtttccaactttgcctggcaccttccatcgtttgctaagttccagcaggtgtatttcatttgcatttccctcatgaataatggtgttgagcagcttgccatggtgcctttgctgcctgtgacctctttggtgaaacatccggaggtgtcttctgcccacgtggaggcgcagcctgggctctgccgcccacctttcacccgaggagcctgcagcacgtggagagcatcagggtgtgctttctttacagtttggggcttttttgagacagggtctcgctctgtcacccaggctgcagtgcagtggtgccatcacggctcaccgccagccttgaccttcacctcagcctcccaagtagctgagactacaggcatgcaccgccatggctggctcttttttaatttgtctttttctaaagacagggtctcactgtcttgattaagctggtcttggaactcctgggcttcaagggaccctctcagctcggcctcccaaagtgctgggattgcaggtgtgagccatcatgcaagtctggggttgttttttttttgctaaacaggatgaatagaaatctcttttgggggatctcttagtccaaatcctttagctgaatgcgcgtgtcccggtgaggctgctcctctagatgctgcgggcattttgcagacgtcccaccaactgccatcagcgaccaattagaagatagggacagctgcacatgtcacacagcccttctgaccttgtgtgtgcttcaagtccgagattcctgacacaaagcagcgtgtgcccccccacccactctgtggccacagctggagtcctgggctgctgggtgctccaggtgccataccccacacacgcatagagcccgtgggctggcagcgggcacccacagtggcctctgcaaagcctgcctggctgcggctcgtttcctcactgcagcatgctcataggaatgtgggagtttcgcttgaagtgtgggtaaagagttctggggttgtttgagccatcccaggccacagggcctccaggaagtggaggaaatggtaaatccagggtcctcttggccactgcgttggcctctgcacacttggcccctgcggaccctggggcttctgctttactgtctgtgacataaacaagtgacgcttgccaccttcttgccgggaaagccaggctgggttttctcatttccaccttttccctgttttacacgagggcacgaggatggggctgcagtatcagtgacgcacctgtcaccagcgggccacagagctttgtgttagcccctctcaagccctttagcttctggaaccgtttaaattcttaaaaattatacaggaccccaaagagcttttgtttatgtgagctttatctattgacatttaccatactaggaattaagaggacatttaaaattatttagctacataaaaataacaataacaaacttactacctgttaacacacattttaaaatgaaaagtggctacattttccaaaacaaaaaacgtgaatctttagctcaatcaatgtttcaaatggaagcattatgacagtcaaaagctggcaactaaacataactggcacaagctctgccaccgagacaatggaggcctgagtagtaggctccctgcagaatgaaaggactggagctgccagcatcaacaccaacgcatctcccaacaagggtgagtgaaaacacacacctaaagacctcagagagcacgtaagcacacagctgtgcatccactctgagggtgagccaccaagcacacggtgaccccggggagcgcccgaagggagtgaagtatctgaaggaaagaaggaagtgagcgatgggcaaaggagaacctgaggaccctggcacagtctcagctgcaaacatctagtcttgcttaactggggtgcagaggccactgcacctcagggttctcacgaagcgcctgacctctctattttattactattattattattattttttttttttgagaaggagtcttcctctgtcgcccaggctggagtgcagtggtgcaatctcggctcactgcaacctccacctcccgggttcaggcgattctcgtgcatcagcctcctgagtagatggaattacaggcatgtgccagcatacctggctaatttttgcatttttagtagagtcggggtttcattcaccatgttgcccaggctggtcttgaactcctggcctcaagtaatccgcccgcctcggcctcccaaagttctgggtttacaggcgtgagccaccgcgcctgagccctctaagagcccccgcctggcgtcgctgtaggcaaatcccaaagaacgtgtcccttcagcagccggctggggcgccacaaacactatctgttgtcttcgctttagtttgtgtcaaagtgactcaaagttacacaacactggcgggcgactgccgcctttttaccctgtggcctttcccatccaggcgtccagagggtgagcccctgccctccaggacccctcccttccaggaccctacccgtctgggactcaggccttccctgactcctccctcccggactcacccctcccagatccctcccctccgggaccctctcccctcccgggccccctcccctccgggaacccctcccctcccggactcacccctcccagatccctcccctccaggagcccctcccctctcgggacccctctcctcccggacccaccccttcctgacccctgccctcccggacccctgcgggactagatgtatacagctgagaccatatcacggttctcaccctcgctctaccctcccggacccctgctctcccggacgcgtggactccagctcccgcctgggtccccaaagcgctgaacccatggtcacttctatgcgtagccctggtgcccgccgcccacagccggaccgcactcctcggcctccgcctaacccctggctcagccacacgagtgacagctctgcccgcccgggcgggcgacgccgaggggtgggctcggccccacctgagcagttccccagcgcccctctgaaacccgcctgtggtccctggcgccgcctctaggggccgccgccgctcccctatgacacagcaacaataggggccgctctggtccaagcgccctgcggcccgcgcttccgccggaaaagagccgccggcgcgggggcggaccggggaggagcgagtgcgatggacggtcgccctcgccaatcgttggcaggttagagccggctgcgcggcttacggggctcaatcggcggcgagagcggcaggcggggcgggccgaacgcgggtttccggcggggcccggcaggcgccgaggaggaagagcgagcccggacggcgcctctcgaacgagtgtgggcgcgaggcaggtgcgggagtcgccgggcctggggcggccgggggcgaccggaggcgggggcaggggctgctggaccaaggatggggcgggggcagccaagacgagaaggtggccggcgcggcgggtggggcctgcgggggccgggccgggcgggggttctggggtctcgggcgccgccccggttccgcctgcggctctgaacgtggggctcggcgggagctcgggcgggtctgccccgcggagcgggtcgccggggtggcgcgtcgaggctggtgccccgcggagacggcgtcaagcctagggccggccccactaggcttggcggggctgccccggcccagcgccgagtgcgggcggtgcgatcgtcgtgagcggggcaaacgcggaaaggcagcccggcgtgtctgagtctgccttaggcagctctgggcgcaggccccctgctcgcaaacaccccagggggcgggagcttgccggaccgcaggcgacagtgaccgccgcgtctcagcgtcctctccgcgctttcaggatgacgacctcaggcgcgctctttccaagcctggtgccaggctctcggggcgcctccaacaagtacttggtggagtttcgggcgggaaagatgtccctgaaggggaccaccgtgactccggataagcggaaagggctggtgtacattcagcagacggacgactcgcttattcacttctgctggaaggacaggacgtccgggaacgtggaagacgtgagtgtccctgagccgcagcagcaggacaggcgacttctcgggccctcggagtcctcgctttggagttcgcggtgggggcttggccgcatctggggaccgctcgtggggccgtcatcgactgccctgctgatgggtcgtcctggtttccgcggtgacaggggcatctcggccactgtgtatcttgaactgtccgtgtgaggtgcctgggttggaggtgtggccctggagagcccggagctctgtgcctggccttgaactgtccgtgtgaggtgcctggggttggaggtgtggccctggagagcctggagctctgtgcctggcggcttcactcagtcttctttgtttttcaaactcttagttgttctttgttacatttgagagcagttcagcgttgactttttaactactctgggaatgttgtttccagcacgtctcagaaaccccgttgccatctgaaaggcccctttccctgctctctcccccggccttgcctttcatgggctgtctctgaccctggcttctctgccttgtggagaccctgccagcgaggggtctggcggcttagctgccccttgcgcaccccacccggttagacccagggctcagtacgctctcctgagactgggcacagtgatgccatctgcgccactgactctctcttcccctggcttgccaggacttgatcatcttccctgacgactgtgagttcaagcgggtgccgcagtgccccagcgggagggtctacgtgctgaagttcaaggcagggtccaagcggcttttcttctggatgcaggtatggggcaggccttggggttgtgcctttttgttgccctgcgattcggttaggaacttgcttacagtgtggtgcaattggcttttataaaccagcaggcgccggccacacccggccacacggcctgagatgccacctcagggctgcggtgcatgctacctggggccgaggtcctctcccagagtacggaggctccaggctgggctgcgggcaaccgattgcggtgtgaaatttccaggcagacagacatgctggccctggttctaacgatgcccagtgccctctctctgccccttgccgtgggtcactgaggcccccacagcagaggcagaggcccctgtgtggcttccctgctggtgctcacagaaacgaagcatcctgctcacactttccacagtcctgccccttccctggcagtgtgtcctggaggccaggggtgtcagtgcccagggtttctcttacccacagctgcagagcgtcttttgggtctagaggccgctgctcattctgccatctgtcagtgaccattgagcttgttgccgttttttgtgctgttacaggcagtgttgcaaagaatttcccggtacacagatcattttccataagccagtatcatctgtaggtgaaaactggtggcgggcctgtggtcaggaagcgtgtgcatgcgtttgcagtgtggagagagaaggccatgctctctgccagaggtggagctgctgtccccaccccaccccccttggcactttcaagagcaggggtggccctggctgaggtctctgtggagcacatggtctgtgttgctggtcacctgtgcaagtagtgtgcagcggcctgagaaaatgaacaggcatagccaaactccagttaaactttatttgcaaacacagatggcggccacaatttgccacctgctggtgtagaacgtgtttttccacggttttgccaagaaatagtgtccaactgttaccaccatctcccttttttccccgattttcctgttggtggcttttaagtcccccgtccctgctttgccatgagagcagggactcccagtgtccctggcgccctgcagcttccatagccattcggggtgtgcgtgggtgctctgctcccagctctgtgagctcgcaggtcgatgcttctgacactgatctgtgcacatgtgtgtgcacacgcgtgtgctcgattgtgagcgcctgccgtggccctgggccgcggtgtgctgagcgggccagttcgctgccttccactggttgaaggaaggagacgggtgtgtaaagaaccgcaccccagagggcaggagggtgagagggcttggtctggcagcagctaagtgccttcggagctctaggctccccatttgtgaaatgggcggagggggacagggcacacccgggattgcggcggatggggacagggcgcagagcatcgtgctcaggaggcgccactgccgtcccctcacctgctgggccgggtcctgtctcctcagcattgtgtggccaggcacacgcgcctctgcgtctcaggtccctcacctggaagccaggtcagaggatggctgtggtggccctgggtgagctggcgccagctcctgcccttacatgcccttcctcttgcaggaacccaagacagaccaggatgaggagcattgccggaaagtcaacgagtatctgaacaaccccccgatgcctggggcgctgggggccagcggaagcagcggccacgaactctctgcgctaggcggtaactgtcacatgtgtcacgtgagctcagggtttcctgggaggccagagtctactgtggatgactcgccccctcagcacaggttgtttggaagtggaaatagaagattctaaaagttagagaccctgtgagctccctgggtcactccccactcccaccttcacggggtaggacgggtctgcatcccaccgtcgcctcacttcaagtggtgccccctgtagggttcaggggcagccgagtgcggtgctcagcagaggcgcaggcagtgcggtggggcccgcgtggatctggctggggcaggcccgcctgagctgcagtgttttccaggtgagggtggcctgcagagcctgctgggaaacatgagccacagccagctcatgcagctcatcggaccagccggccttggaggactgggtaacgtgcgccacccgggctctcgggcagcttctgctgggaatgctttgaggcccggtctctgtttcctttaaacttctgctggctctgtctgcgtagtgtcggggagcctgtgtgtccgcaagctggttcccctttgggaatgcgcttgtttgcctgtggctagagctgggtaggcgagggcttctgggcccctggtgaggaccccagctgggtacttcagaggagggtggctggccgagcggtggggctggaggactggagggagctggggttcctgcgccctgggtcccctggccctacatggctgcctgcctgctgccagctcatggagtgcagacccgtgtgcttggcccttcagaaatgcttgtccctttgggtgggatctggactgaatcttctaatctaagcacatgaattgtgtaatgggatggaacagaaatgaccttgcttccagaacacagccgcaagtgtccacccgccccacgccgctcctccaggcctgtgggtccccaccgccccgcttcttcctggctttggtgttgggaattcctgctcctctggcctggggaggggccaggctctttctggtgggctagagggcatcctgagctcgcatttccttgcccctcgcaggtgggctgggggccctgactggacctggcctggccagcttactggggagcagtgggcctccagggagcagctcctcctccaggtgagcctcatcgctcctgccacgcaggtgccacggtgttaagggaggggcagtggggaatcctggcccagcaccctggaccctgcgagtaggccctgccgtgtggggcgtgtccgctccagcggtgccctctctcttcgcagctcccggagccagtcggcagcggtcaccccgtcatccaccacctcttccacccgtgccaccccagccccttctgctccagcagctgcctcagcaactagcccgagccccgcgcccagttccgggaatggagccagcacagcagccagcccgacccagcccatccagctgagcgacctccagagcatcctggccacgatgaacgtaccagccgggccagcaggcggccagcaaggtaacgtgtgctgtcgcctggagctgggtggggggcatggggcctgctgaccctcgcacgctcaccttccaaggcatctgcctagtgtgcgcgcctggggtgctggggccatgggctgagtccctgcttgcatgccttccatgtgggcacttaggctgtcatcgagctgatggccgtgttcttgtgccccagtggacctggccagtgtgctgacgccggagataatggctcccatcctcgccaacgcggatgtccaggagcgcctgcttccctacttgccatctggggagtcgctgccgcagaccgcggatgagatccagaataccctgacctcgccccagttccagcaggtagaggccgggcccagggtgtcctccactgtgtgctcagggagtgggcaggggggaggaggaggccctgccccaccttcaccatggccagtgcttcatgtgcctgacccgcagagctggcagctgagcagtgtggctctggggtgcagcccgggttggagctcagccctcgcctggctcttcttgcaggccctgggcatgttcagcgcagccttggcctcggggcagctgggccccctcatgtgccagttcggtctgcctgcagaggctgtggaggccgccaacaagggcggtaagtggctgcgcctgcacctccaggccagagccaggggcagggtccattcctgtccccctggatctgcagaagtggggctgagggggtaaaggtcacagcccttctgcccttgatcccatcgctttgatccccagttctgggcaagggttagacaccaccttgtgtctttaacgtgttctagatgtggaagcgtttgccaaagccatgcagaacaacgccaagcccgagcagaaagagggcgacacgaaggacaagaaggacgaagaggaggacatgagcctggactgagccacgcgccgtcctccgaggaactgggcgcttgcagtgcgttgcacaccctcacctcccacccactgattattaataaagtcttttcttttacctgccaatgcttagtttctttgcccaaagggagtttcggctggacaggtgctagcgtggggagctgctgtagggtcccagagacagttagttatttgacctaacaacggaaaacggtcaccccaggaagagtttggtgcctctgtccaggccggttccagatctgtcttgagactcactctctccgtatttaagtcaacattcattcggttacacagaagttactttttaatttttaaggaggaaccagtgatgattggtgacaaatctctcacaattaaaaatgggtggaagggccaaatataaaaacattttgcagtattttattctttcgtttaagaagctataacttaaaccatcttcagaaacaagatctgtcacccgtagagcttagagtccaaatagacacctatgaggcgagcacaaggggcggtgtgaggcagctgcaggggcctgaccaggggccggggttggctgtgtcctaggcggctgggcagccactggcccccactgccccgtggacctccacagagcgagtcatggcgacgggggaccggttcaccgccagcctcctcatgcagccgcagtaggcggggggccagggctgcacggccatgggctctgggggcacagggaagatggaagaaggctggttggtgggcagctagagacccacaggcccttcccaaacgtcagtgccccacccagcccctgtctcattccacatcataggagggtggtaggggggtgggaggagggtgggagggggcagggggtggaggggtggggggagggtggtaggttacgcagcacctagtcctgaggggcagctcccccacccttgatcaaggccgcactcaccaggcaggcccccgaggtacagaggggctggggcaccagctgcagccgccagcaaggggcccacggtgtggttgctctgcgcgtccacctccagccggagcacattcccgcttttcatcactgggagaaagggggactcctgaggccaggtggtcctcagcccagcctctctccagccccaaaagaagccaccccacccagagtcccgcctggctcccgctctgcagaagggtgggggtggcagagtgccctggccacaggaggggcctcacccgctagccggtgccactggccatcacacagcactgaggggcgggtcactgacgtggagaactcccctgctccgtcatccgcccgcagcaggacctggcggggtaggaagggagggtcaggctatgcccccgaggtcaccagaatggggaggcaaaccctgccctggcacgccacctctgccaggcttacttgcttctcggtcacctgcaactgcaagtaggggggcgtccgggcctggcccaagtggaagatcagtccggtgactgccaggggccgcacctccagttccaggcccacatcaggcagtgtagctcctgggaggtctgcggggaggggttgtgatggagaagaaagggggggcccctccccagaacctcctggagccccctgccctgccctgctgaggcctgggatgccagcacccacagacctaaagtgataactcccccgctgcctgggaagaacaggcccgcctccagggggcccaagatgcagggtgtgacccctgccatccgtgtgggggcccccaggggcctcccgtgcagcctcagtctcttcacacagccgctgaacccgacggtcacctataggagcagaccgggcagggatcagggcccagggcagctgaaagggaacagtgggtggggagtgggggctggggcaagatggttctcaccggaagtttggagctgtggctgctggccgggaggccgcccacaaagagggtgtggggctgggggtgctctgccccctggtgctgccggtgcggcccctcctggctccaggcccgggccccgtccgtcaccagcaggatccggttcttctcccagcgcacggagacctgggggcaggagatgggtcagggtagggctgccaggccctgcccaccaccttccttcttctcggccctcaccttgtgccagcggccaggccgggagcgctggcggctctgggcgcggagccgagtcccgaggccttccatctgtgcaacgaagtggccattgctcaggaagagcgccagggaggggctgccgggcctcagacgggcagtgaagaggaggaggcctcgggagcttcgcgggaggacgtgcatggagagactgggcctggaagcggagctggcgtcagcctgcgcggcccctctcagcccaccccagccgggcctggccttaccagttcctatgtcgggccaggatgcccacaaactccaggtgactggacagggaacccccaaactggtaggagtctcgggtggtcctgaggtgtgggggcagcatgcaggcaggatgccgggcgggctgacggctgcggcgggaggcctgggggcgtggatggtgaatgcaggggccgcccacacaggggccacccttccagccaccccagctctgcctgctcacccctggggtgcccaccttccgggcggtggcctgcagtcctctaggccccaggcccggggtctgggcttgcagggcgggtgcacagcccgtgctcacattgacgctgcccaggttctgctgcagatcaaatacgcgctgtgggcccaggagcctgtgcagggcgggcaggcggtcagcagctgcggaaggccagctgggaccttgtcccccagcgcccaccaggctcaccgctgcacgaagacgttgctgatgcagccactgaagttgtaaatggtgccagactcaggcaggcctcccaggaggagcctcgggggcccctcaggctgcggctggagctcggggggtggtccccggtggggcttcatctgctggagctggtcatcgacatacagccagactctggggggcgggaggccggaggctcggtttttccccaccctgcccacccccacctcagaggagacagaggtccaggcaagtgcaggcgggcgtccctccagaccttcacgatgagggcccagcggccaggctcaccccgtggcattgctgtagaaggcgacgtaatggggggcaccatcggcgaagcccgcttgagttttcacttcagtcctcaggagctgtaggctcacacggccctgctgcagggacacctggcatagcccatcctggggacggcagccaggtcagccggccggcctggggacccagactcattccagacaccccagtcccaactgctccgacggccaccgcggggtggggaatgggcacgggtgtgaggtctcaccggggacgcccggtagtagagcagggcactgtcctgggcgctgtggaagccgaagccggagtagacgttgccagtgagcggtgccacgttcgagagcgccaggcgaaggaagccgtggccatggaaagtcatggcgcgccccacctgcggggaggccatccctgagtgcccgcgggtgcccctgcatgtccacagatgccacccccagcccggggagggctgctcaccagcaggtcggcggtgcagccggcgctcacgcctgtcgtgttcagccgcttgaggtccacatacttgcccagggccttgatgcctttgacgcagccacggactgagcctccggtggggaagagccgtcgcaggctgtggggaagcggggatgcgggtcagggcgccacctccaagcccagcctaccgccccaacagcctggcctcggagccccagctgcgcacagtgcttacctcgggggcagctggtcgggcggcacgccccccaggtagtaggcgtcggccagctccagatcattgtcctgctccacgctgtacaccgtggcccgctccacacgcaccagcacacgcttgcggctgccccccagcaggaacacctggatctacaggaccagtgggggctccagggccagctgtgtccctgcggcctgccccgcccccatcgttccatctcctctccctgccaccctggtccccaccctggccctaccgccttgctggccgaggtcaggggcggtgggggctgcagtgggacggcctttttcaggccagccccaaagtcatacaacagcacgaggctgccttcttgcacggccaagcacaggaactggctctgcagaaacagggcagggttagtgtggggcagggtcagtgcaagtggggatggcaggacgggtgtgcctggcgcacctgctgcttcaggaagaagagcaccccgctgtaggacacgagccgcagctcctgctcgaagcgcttggtggtgctgatctgactgtcgaagctgatgcgggcgaagccggtgccgtccaggtaggagccgtccgtgagccacgggtccccggtcgacttggagctgcaggtcggagattctggggtcagcggagggtggggtggggtgggtggagacggggagggcaggccacacgcaccgggcacaaggcctgtccacagccgtgtccagctggaaggtcctctcgaagttgtagaggctgaccacctcctcattcagcgtgtccatctcgatgcagccccggtagccggggaagcgaagcaggggagggggctgtgggcacagggctgggtcagggcacctggcctgaggcgcctcccctccaggatggaccaaggggacttcagactacagcaggacggactgaggcaagataccaaaagaacccgcggctctccaggacacaagcgactcggggctgcggagcccctcccaggctgccccaggccgggcgggctcaccgtgaaggtactggggtaccccccgacgtagaagacgaagtcgtctggccgcaggttgagcagcccctctgccccaggggccaccgtgtcacccttggtttcctggatcatctgtctctccactgtgacggacatgtggccaaactggagagtcctgagggcagaggcgaggggtggcgagtgggcacggagagatgaggggtggcgagtgggcacggagagatgaggggtggcgagtgggcacggagagatgaggggtggcgagtgggcacggagagacgaggggtggcgagtgggcatggagagacgggtggcgagtgggcacagagacgggtggcgagtgggcacagagacgaggggtggcgagtgggcacggagagacgagggatggcgagtgggcacagacgaggggtggcgggtgggcacagagacgaggggtggcgagtgggcacagacgggtggcgagtgggcacagagacgaggggtggcgagtgggcacagagacgaggggtggcgagtgggcacggagaggcgaggggtggcgagtgggcatggagaggtgaagggtggtgggtgcacacggagaggggagagatggcgaacgggcaagggccctgcagttggaggcatccggcctctctcctgggcctcccacctgtccaggctgacagctgcgaactgctccccaatgtcctcatcgatgcttaggactgcagggcccgcctcacccagctgatacacccagtgcaccttcttgtcacgcagagacacacccatgtagtccccagtggcctgcggcagtgacagacacacagtcgggatggggaccggggaccagggaccaggcaccgctcatttccaaacagagcctgagctcgggccgcatccacccagccagcctggtacctggcggctgcccatgtacatcacaaagcgatcctcggtaccctgcccaggctcaggctctgggccctgcaggtagaacttgagggcagtgtaggcagcaaggtcggcaagatcccgtggggtgcgcagctgcacccctgagcgcccgttgaacttcatgggcaccttgacctgcggggcacggtccatcagcgtccaccaccaccctccctgatgtccaccttcccctgggactctcacccaccttactggcagccccccgggcctgggcaatgagctctcgcacgcggccaatgctggcggacagggccaggctggcgttgtgcaccccacggttctccaggatgctcagcttggccagcagctggggcagcgtcttctccagggtggacactgcagagagggagacctgagacctttgccccccaccgtgcccgcctccatcaggggcaccgcgagggccatgggcgcacctgagtggcctgcgtcaagcactgcctggcccaggtcctggccccgcaggccctcgtactggccctgccaccgctccacattctcctgcatggcctgcagctgggactgcacacgggtggcggtgtcctgggcttcagcagccacagccttggcatgtgcgatcttcttgcttgtctcgtctgtggtgggcagagggcaggctcagcaggggccagcggggaccatcctggcttcatgtccccaagtctttctgttgggccagcaacagggacatccaaccccctatggatcgtgtgagaccctcacaccccgctgctcagtgcaatccaaacccatcctaaatgcctccaccagacgccccctccatgccaggacaggcacccagcctctcaggccacagctggtccctggacatgtgccccatgtcacctcccaccacctggcccccaccatctctcctgggcttgctgggaacagtccgcagccacaggggtccctcagaaactgggtgaggcacatcgtcctctgctccaagcctctcagggtgggagccctggtcctcaccgcccaaggtcttgccagccccttggttccagccacgctgaccactgtgccctcctgggtgcccttcctgcagggtgtgccccaatcccccccaaggcctacagccctcccacctataactccatttctacccaaagcacttccaagcttgccaggctcccgacggctggggctgtctgtgctatctgcagccctggcacctccctggtaggctttctgtgtctggccccagctgcccactgtgggggtctcttccacagcacagtgagtgctcaccaaccacatgtggccagcgccactgtcacagagcctcatggtcggccggctgcgagagccgggcccaggctccgcatacctgtgtccatggcaagcatggcctgcgccgcctggatgtgcgcctccagctggtccttcttggcccggacatctcggagctgggtcctggcaccctggagggcagcccacactgcgggggaggcagcttcagctcccaggcagcttcacccccagtatacaattgcagcccacctccacccttctgaccccaggaggaccaaggctgacacacagcagacagatggacagggacactcagacatggagtcccttagcctgtggggaggtgttgagtctcagcgtagcctctgttccctgaaggcctctggtcccactgcaggcatagctgtccccattgtacagatgaaacaatagaggctcagaagagacagccctctggtcctagcagctcacacctttctcattgcgcagcttggcacgcgtgtagccctcgggtcagcagagcagaggccacgtatctcttgccctgtgccctgtggctcagctggtgcctcagtggcagccagtgcctcgcaggaggctgctcctccctggactcccctgcagggctccccggggctgacacacaagcagctggggagccatctccaaagctctcccaccccaaaccatgctgcggtgacccacaaaccccacgtgtgcatgtggctgggggctgagggtccctgggagctcagatgcccagcaggcctaagggcccccatcggagcccagcactcaccaaggcccagcctctgctgttcctggagcatggcctcttctagtgcagtgctgttggccaggagctgctgggctcggtccaccaggccctgccgcaccaccgtctgtggatgccagggcagaccgtggctcagacacgcaggccggggctgcgggaggtgcaggcagtgggggcgctcctgctggggctgaggggaagtgaggggcctcaccgcccacgtgtggtccgcctgctgcagggcctggccagcagcatcctcggcagcctgcacggcctgcaggatgcggctgtaggcgttggaggcctcgatggccctctgggtgaggcggtcctggttgacgtccaggatgatgctgcagcggaagggagggtcgaaggagtgggtaagcgcagacgccctcggcctggctctccagcctcctgcgctcacaaccagccgtgcccgtgcctgcccgccaagtcccgcctccaggtctttgcccgtgcctgtcgcctgctgggtgtactgctcctgtcactctgggccccagcttgccgtggagctgaggaaggcctggcttctttgaggacaacggcctcagcccctaggagccttcccagaccagctggccctcccaaggccctgtctgcatccccagggtgggcccagggcccctcctctcctggccacccacctggacagattgagtgccagctggcccagctgctgtgcgtgggcctcggcggcctccactagacgcagcttgctgcccgccggggagaaggtctgcatcctctgcagcagtggggtccgagccccatccaggctggcggcgaggcgctccagctcctggaatttgagtggacttagcccctcatcctgctcacagccacctgatccacgaccctgagggcgggctctgcacgcaagtgtgcacacaaagctgcccacgggcctgggagggagttggccgtggatggggtggcgacaggggccaggggctgcactcacctccttagcctggtccaggctgtgcagcaatctgaagacgctggccagggtgtccctagccgcatgcagagtggcctgcagggtggcattgtcccgggacagctcctgcttcctttgctgaaggcaatgcaggggagttggggacaatgaggggtaagaaaagaataaaggatgtgatggggtggacagcagggcagggaagggagaagaaaagagggggagtatggggggtgaggaggggggaggaggggagggttagaacgtgtgagtatgagggaaggaggaggatggaggggtagagagaaaagtggggaagaagagaaaggaaggcggaagggggcaaaagggggaggggacagggagggggagaagaggaggaaaggatgggagggggtgaggagagatggggaaatgagaggaggagaaggggaaggagagaatagaggaggtggggaaagggatgaggattggggagggacaaggagggggagggggatgatgggcagatggggagtggggagggagaggacaggagaagaggacaggagaagagggaggagagaggagaaggggagagggggaggaggaagaggaggagggggaggggagtacgaggggaggggaggaagaggaggagggggggaagaagaggaggagggggggaggacgagggaggggaggacggagggaggggaggacgaggggaggggaggggaggagccggagaggagagggattgcagggaggaggcgggaagaggagcaggaggaagaacaagtccggggtcctcaccagggcttcctccaggcgctcctggttgcggctgttgagctcctgggcctcccgtgtggcgtccactgcccggttcaaagcctctcgcaggtccatgaggccggcctcgtgctgggccagccggtcgcgggtttgtgtggccagtgcctggttctcctcccagaggctgctcagctgctcctgcacccgggccagcactagccgagaccagggtgagggtggtcactctggaagccaggccccttcatgacccctggtctccacttggtgcccgccagatccatctgccccgtgatgcccacctgatgccactccatgctgacctcccccttggagctcccaggtccctgcctctccccaccccgcctgccagggacaacaccactcacatctctgtgctgcagccaactcagcctcagctgctgcctgcggggcccccaggtcccgggcccgcatctcccagagcagccgctccacctcggccagtgtccggagcagctgctcacctgatggagccgaggcattggccagccccaggtggcccgtctgggacatgagctctgtggggcaggggttcgtcagagcctggggccgcccgtactagtgcacctctgcctgctggcttccaagcccaagaccccagccctgccatccttggcaggccaggggcccggaacctgagcgcacctgggtggcccctagagcacctggcgaaaggccacagctgcctcacctgcccggccctcacctcctgcagtgcctccaacaccctgacaccagtctgctcagccagcttctgagccttctcgtcctgcccctctccgcctggcccaccctgctccctggccagctctctctgacatggcaccccctgccgacccccaggctgggctggcaggtcctgttaggcaggctcagggagccaaatctctcctgagtcccatgtctcagtgtgcactacgggatatctgtgagcgcgaacatctaaccggcacatttcctggggaggctgtcgaggggtctgacgtctcccggggccacctgtctggccacacggctgtgtcgccgacctcctgaccctgccctactgttcactccagaggcgtcgtctcccatctaaaagacagatcctgcctgttcttccaggccaagctcggccaggcacccccacccctaccccaggcagccctcctggctctgagccctgagcctggctgggctggcccctaccgctcagggtgcggtccacagcccggatggccgccaacagcgtcttcgcatggcccagtgtggcctcggtgccggccagcaattggctcgcctggtctcgggtccccacggcctgtggaggaagagcccactagcccacgctgctggtaggcgagggtcggggtggcaagggagggcctggggtctgggggagcgccgagggtcccagggaagaggggccccttatctatttaactctcttatctgatgacttgttatttatcacttgttagttacctaaaattattggttataacttgccatttgttatttcctgtcaatttaatgaaatagttactcattaagacatttgaggccggccacagtggctcacgtctgtaatcccagcactttgggaggctgagatgggcagatcacctgaggtcaggagttcaagaccagcctgaccaacatggagaaaccccatctgtactaaaaatacaaaattagctgggcgtggtggcgtgtgcctgtaatcccagctactcaggaggctgaggcaggagaatcgcttgaacccgggaggcagaggttatggtaagccgagatcgagccattgcactccagcctgggcaacaagagcaaaactgtgtctcaaaaaaaaaaaaaaaaaaaaaaaaagacatttgagtgatattatacactgtaaacaaatgtattaggtagtttagatagtaattcagtgacttggtcaacccctaagactctcgagctcctgtcccctgcactgacacatgtacgaggcatgaagtaacatctgctgaatgaggacaagcgaaccgcggggaacacaggtgaaagcctcccggggccctggggggtcttggggctcctgcctggccgcctagccgccgtgcgtcctgcccgaggcttgtgctctgctgctccagcacctccagctgctgtgccgtctcatggcgggggcccagggggctccggagctggctctgtgggaggcgaaaggtgaaggcctgcactggcccgggttggggagggaaggccaggacgctcagtacctgcaggtcagcgatggaggcgttcagcctgtgcagacgggcccaggccatggagctggcattgatgccacgcagttgctcgtgaatggcggggaggagggcgccggcccgttccaggtcatccaggagcaggaccacacagtggtcacacactgcaggcgatgtggggtcacaggtcagtgtcattgggtcaggccaggggagaatgatcagctggggccctggggtcattagggtggggagggctcagccagaggtcatgaggtcagcttagggacacaggacctgtggggaggtcccagagttctggcagagtcatagggtcaggtaggagtcagatgggagtgaagggcatggggtcacccagggagaaggtagggccagcacaaggggttggggccggaggtggggccagtgaaggggcggggccggtggaggcagggtcagtgaaggggtggggccagtggaggaagagggggccagtggaggaggcggggcctgtggaggggtggggccagtggaggcagggtcagtgaaggggtggggccggtggaggaagagggggccagtgaaggtgtggggccagtggaggaggtgcagccagtggaagaggtggggccagtgggggtggggtcagtggaggggtggggtcagaggacgggtgggttcagaggacgggtagggtcagtggaggggtagggccagcagaggggtagggccagcagaggggtggggtcagtggaggggtggggtcagtggaggggtggggtcagtggaggcagggtcagtgaaagggtggcgccagtggaggaagagggggccagtggaggcagggcctgtggaggggtggggccagtggaggtggggtcagtgaaggggtggggccagcggaggaggtgcagccagtggaagaggtggggccaatgggggtggggtcagtggaggggtggggtcagtgggggaggcagggccagcagaggggtggggtcagtggaggggtggggccagtggaggggtggggtcagtgggggaggaagggccagcagatggggtggggccagggcacacaggaaggctagggacagtagaggggtgcagccagcagtggagctgcagcgctcctcagcgtggttggagttggacaggcatgggtctctcgggaaatggaaggcagctgggaccactctgggaggtcgacgttaacactggggtcaccaggctgtgtgggacttggattcctactccatcaggtgtggggaagtggggtgttgaggacacaccttcacagtggatgctgtggcccacaggcccgcctggaacaggcacctgatgctgctggctgcaggtgtcgcagcgctccccgctgagccccggggggcagttgcagcggcccgtgtgagggtcacagcggcccccagggcactggcagcctgtggtggggggcttgggtgagcatggctggcctgggaccttggagcgtaccccactcagaagtccccatccgccctcctgtgaccggccagcactcacgcctgcagccctgctcagggagcccccagtagccaggggcacactcgcggcactggggtcccatggtccctggtcggcagtggcactgtccgctctgggggtggcactcggagccctcggcggccggtccacaagcacacgggcggcagcccccgcagccatcgaaaccaaaatgtccctcctgtggcacaggctggtcactgccctgcccagccctcaagactgtcccagaccaacctggaagccaggggtcctgcccatctggccccaccccctgaggctctgcccatcaaacactgcccctcagccccacctatcagattctccccaggccccaactctagtccctaggccccacccacccagccctgcttaccccacagccctacctggcagcggtcacagcgccgcccagtcacgcccgccttgcacaggcagtgcccgctgtgggggtcgcaggcctctgtcccacatggggtacagtcgcaccctgcagaaggggtccgtgactgcagccctgggccctctcacccccccagggagcccctaggcaccctcctaagccctcacttcactgcctcctgctgtgtctcctccaggccgcccggaccacccggctacccactcgtgtcccagcctggccccactccccagctgcctcccctgggcccgagggacctgcagactccctgccatggcctgccctgctctgacggctggtgtccgctgccagtggtggggcattggtggtggtgtctaaccatgaggggggactgattgtggggggagaggggatgtgatcgtgaggtggggggggcgctggtcatgggttggggggagggtctgatggtgaaggtgggggcctgatcatgggtaggggaggggggatgtgatcctggtatggggagggtctgattgtagtagggagaaagggtgtgatggtccgggggaggcctgatggtgaaggggcctgatcgctggggcgggagggcctgatcgctggggcgggaggaccggatcatagcgggggagaaagggttgaccatgaacccagaaggctggctccgacttgtcctggctgggccccagcatcaggcacacagcctacttacggggtacgcccagcaggcctccctcctccccgcgcaaccctccccagggtgcatccctcccagcccgacgcctacgggtgcagttgccgggcagcagggcgttgccgtagaagccgggggcacagatctcgcagcggggcccagtggtgtggcgcaggcagccacggcaggcgcccgtcagggggtcgcagtcgctgaagagcaagttggggtcaccgttgccgctgcagtcgcatggctggcaggagctgcccagcaccagtgggttcccaaagaatccgggcgcacacctgggagcagggtggggaggggccgtcagtggcccgtggcgcccaccctcgcatatcctggggtcagcactcaggccctgccccactgccctagccccagctcaccgctcgcaggaggcacctgcataaccaggtttgcagaggcactgggtgcggccgcctcgcaggacacagccctcggcgaagctgcaaagaccagcagcgtcagtcactaggcccctggcagtgcccgggcccgggcgagcacactgtgctccggctggaacacacgccaggcgtcgggggcccagacctcacggacacctccagctgtccaggcctctgcagagggcagtgggaacccaccccgctgctgggtgaagggagcctggcaccatcagggcctcgtcccgggaggaggctggcttacttgttggaaggcactgagagggggcaggggcagctgacacagggggcgctggggtcgtccctgctgctcacgaagccagcctggcagcgctcacagtgggccccttcggtgttgtgctggcagtcctggggcagagtggacagtcagagctatggtggacacccacatcctactgccgagtctgtgcagctcccaccacccctgcctcagactctgtgcccaaggccagatggtcccccactgggcaacacccttccccagacctcagttgacctggaagtgcagcccctggtcttccctggcacacttgactgtgccttcagtgaatgctgcccccctggccccaccagcccctactcaccacacagacgccagagccagggaggcagcggtctgagtgtccatggcactgacaagggacacatcggcccaggaagagacctttgacgtcccgatagaagccgggggcacattcctgagggtgtacgggggcaggtggcatcagcgattgagaggacgaggggccccaccctgcaagctcacaagtcagaccctcagggatcctgcaggcacgaggcactgggaacccgtggagcatggtcaccgctgggtcagaggctggtcaggaactcctggcctcggccggctggaggtgggccagcacctggctgctgtttgaggacatagctctcaaagccacacggatgtcctgtctcgggaatgaccaggccttggggctggtgaccacccactccatgtggaccagggcctactctttccactccttctaggaggtattcaaccacaaacctcctcatacagaaggagcaaagttacagcagacagacagattagcagggcagattagcagctggacagacacacagtgggcgagggatgggcagaatgacaggcagacgccaggatggtcggtgggggatgtccaggtgacccagtggtgggggctggggtaggtgggaaaggggtatggagggtgtgtgcatggaggggcaggcggatgaggggcaggcaggcggacgaggggcaggcagacaggcagcaggggacaggcaggcccatgagttggccagcagcctgtgaaaagcaggggcaggaagagaggtgagtagggtgacaggaagtggaggcagcaaggaagggaacacagggaggatgctggagggaagggtgtgcacaggtgagccgcctcgcagtctggtgctgtcctaacctcacctggcatgagtccccccggtagctggcggggcacaggcacagctccacattgctggccagggccccctggcctgctgggctggccacctccagtgccaccctgcgcaggaagacagccgaggagatctgtgagaagagggcacggatctgcagctgctccaggctggccagcaccatcatgagctcctcgcgggacacagtgttgcgcgtctccgtatgccggaagttcccctgtgggtccaggatggcacctcagtggggccacactcaatgggacagaacagggagcctagaacagaccccccaaccctgtaggggatggaggggcacaaagaccatggggcaggaggaggtacacacaggtagaaaaaccagtctcccatgaggccagccagcacctagatccctgcctcacaccacacatcaaaccagctccagatgccttaagaattgaaatacacaaagagaacagccaagcttctagaagaaaacataggcaggtcctttctgatcaagtagtgacaaatactttcttaaacaagatgcaaaaacgcttgctgccaaggaaaaaaggataaattcaagtacattaactataaggccgttcatcagaagacagctcaggctgggtgtggtggctcatgcctgtaatcccagcactttgggaggctgaggtgggaggatcacctgaagtcaggagttcgagaccagcctggccaacacggcgaaaccccatctctactgaaaatacacaattatcagggtgtggtggcgggtgcctatagtcccagctacttgggaagctgagacagaagaatcgcttgatcctgggaggcagaggctgcagtaagccgagattgcaccactgcaccccagcctgggcgacagagcaagactgtctcaaaaaacaaacaaacaaaaaaaaaaaaacaaagaaaaaccagatgagctgtgagaggggagaagacggttgttactctgaagtctgacagagggtaagcaccaagaataacaaagaactctaaaaggatggaaaaagatttgcaagtcaaagagaaatgggcaaaagatgctaacaggcagtgcatggaggaagccaacagctactgagcagctgctcacccctcagggatcagggactcacaaagcaggtgggaagacagcatgacaccccccagggtgaccagcacagaagatatctgacaatgggtgtggggacctccccagcccccaccccgcttctgctcctgggctgttttccaccacggagaatgggcacagcagcactgggaccccttccggccttcccagatgagctgaggtccatgagggacctgggtgcccaagccagctcccctcacctccaccagctgcagctgcccacggtgaacgtggccaggcgtggggtatgccggctccaggaatgtgatgctcatctggttgccctgggaaggcacatggggaggtgagggttggcacgggcctggaccacggtgccactgcgccacgcccacccaaccaccctgccacatcatctcagctccctcacctgcagcaccacatccggcctgctctccatggggacaaagacatctccccgctgggtctctgagtgcagttcataacggagggtcccaccgtaggatgacacctggaggcaggacagacagaggtgacctggccagactctggccacaggctcagagcccgtcagcagtggtctgggcacccccagcacagagccctgtgctgggcctggatacttgcgctcattccctaccgggacagggcctgggcaccctcacggacccccatggagctccccctccctggacagaccccgctcctggctcccaaccctctcaggcgtcctggccatcctcaaagtgcctcccccagacctgatgccctgcttacccggtcccccaggtaggagggtggggcctgccagtacagctcggggaaagcctcgggcacagcctcaggcacgtgccgcaggtctgcacggagcatctccgtccctggctgccgctcgtggggcaccacctgccggtcagtgctcagcagcacccatccctccatatccacgaactgtgggcacacacgtgtggctgcacacgggtggatgcccacacatcacagggccccatcttgcatccagtcccacctaagacctccccgagaaggcaatgccctcagtcctgcaggcgcacctcctggcgggtgtaggacgagctccggcagcgctccgtggccccaaagcagaagcagcgggtgcaacctttggggttggcagcatccagtgagaaggtcccaaggctgcactggtcacatttggggccctgcacgttctcctagggatgagaggacagtgagagtggtcggcaggtgccaggtgcctgaccccgggttcctggtacccacctgccaatggggatgactctcccaaaagcttctaggaagccccagctgccccgaaaggcccgtaaggacactttcagctgatgaggccggagggagaggccagatctgggcccagccctcactcaccttacagtagcactgccctgtgagggggtcacacacgccaggcgcagtgcccgcctcgtgacagtcacaggggcggcagcgggggtagccatggaagcccggagagcaggtatcacagcggcgcccagtcacgttgggtctgcacctgtggcaggggcgggagctgagccccctccaccccaggtcactcacaccaaagtgagacctcgtaggcaccccccacccaggcagcatcctcccagaagtggaggagagggcgctgctgcacccagggagcacaaatgggagcagggtgggtgccaggaccctctggctagaggaaatgctgtccttaaggccaccaggggccgcgctgacgccgctctgggctctcacttgcactggccgctgtctgtgtcacaggtagggtctgtgagctcctggatgccgggccctgagcagttacactcctcacagccgaccagggggtggcagccaaaggtctggggctggcacagcaggcagtcgggcgggatggtgcgtggcgggcagatgcactggcccgtgagctcgtcacagaggcgggcaccgcagtcacaggctgtggggcgggtacagggtttactgacccctcttcccagtcccgcccctctcagaggcccagaatgcagccctaggggatgtggcagtgtgacgggggcgggggagacaagaacagggacccctgccccgggtgctgagccttggacagctcctgacatggaggcagctgctcagaatcaacatcatcgtcagagactgtggaccacctgctggtccctgaaaccttctgcatggcccgcaagctggagtcctgggcccaggcccgcagatggggcagcaatgctgccctgccaggctctagaacattctcctgaccctgctttctggtcgacccgtccaccttgggctctggcaccaactccctgccactgggcgcccaaggactggggtactcacgcctgcagttggggaagccccagtatccggtggcacagcgggagcagtcacggccaatgacatgggcatggcagggacactggcccccgaagggctcacacgtggggcctgtagcacctacttcgtggcagccacatggacgggctccgttgttatagaagagggagagggaagcagcagcgtttcggcagaacagggatgagctgctggggctacatggaggggcacgtggtgaggccagctcccggcccagacccccaccccggacccctgacctgccagagccctgcccacctgatgtggtagccctgggctgcgcagtggctgatgaagtcataggatttatccaggggctcctcccggaggtagccaaagctgtagacgttctcagggaccacgagtacataatcctagggggtgaggcctggtcactctcccgcgggcccagagcctgcagcggggaggcccccagaggctggctgggaccagggtcctgcaggcagctcagagtcctggcagcagcagcccagcccagcccagcccagccctgggccctggctgctcaggggaggccactccaagccaaacagcagctttcgggggcatgaggaggcagcagcattcatgagacctcctggtgtctcccacatctctgtctgctggccacgccttcctcttccctctccttcctggaggccccacctcctccaggaaggccaccctgaccagcagggtgcagggtgcagggtccagggcccctctggagcctcacaaggtggatcgggaggtccccaaaggcaggagctgctttgctgggcacaaggccaggcctcagcaggcccagaagagacagacccagcccaagtgtaccacagtggtaatgacaagtataaggacagctggtccctgagcaggacatcagctgggactcaccagccagagccaccggcccttgggcacacgcacggtcacagtgagctcgctgtgggtcacgtccagcagggcctggccctcacacaccaccagggtgcggcagccgtagccatgtggacagaagctggcgttggcgtggcctgggcgggggagaaaggcagggtcaggcccccatctctagcgcccccaagacacccagagggttgaagatggcagcgttggggcagccaaggagtgcccgctggccaacggccacaggcacgggacgtgcccaagaggtctgcaaggccggcccctcatgtcacgggggttggccgcatcatgacctacagatgtcatgcgggacacctctaggtaccggtcaactccatgtgcgggaccccaggcttggccgagccaggaaccagacaaacacacagggccacatgtgctgccagcggcatcctggggcaagccctcaattcgccacgtgccatggagcacaacggggcttcccaacgcacgagacagaggcgagacccaggcttttctgggaacgggagcgggcgggtaggggctgcgggctgcaagggcagctagtttgagaactgatggcaggacagagtcatgttgcctgtcgctcatagcaggtagcacaggccacgctgtggcgccggcattccagcctcatcgtgtgtggtagcctctccaccccccacaccagacactcaccctgccacacgcggccggcgttgatgaggacttccacggggaaggtggggtgggctggctggtagccgtgcagcaggaaggcatagcggcccagcgtgggcacatgggtggtgaagaccacggtggcctgcagggataggccctagtgagcaggctgagctatgagcccctgctgccccctggacaacctgccctgggttgggacccggagtcctgccctgacacccccgtccctctagagactatggccctcacctggggctcacgcagcagggtgggctctgcatcagggtccacagcggtggggggccgaggtcggggtccagctggggacatggctggagtgagatcctgcgcgtgggtcagcgggaggccgggcggcagcgggatcacctggcagtccctgaggatgatgggctggggcggctttgggaagcgcgagggcagacaggcggcactggtgagagcacagtgggtgagtcagagccggccctgccgccgggccctcggccgcgcccctcccagccccattacctgccattacctgttggggccaaaggcgccgtggctgctgatgcagctgacccggggctccacgaactccgggctgaactcctcaatgggcaccagagtgaccccgtgctgcaggcagagggacgagatgctgcaacgcccgtggtgcggggaggatagggggtgcaggcggtacgatgggggggtgcaggcggtacgatgggggggtgcaggcggtacgatggggagtgcaggcggtacgatggggggggtgcaggcggtacgatgggggggtgtaggcggtacgatggggggtgcaggcggtacgatgggggggccggtcacacagctcagacccaggaaactgcaaacccaggcgtccgaccgagccctgctctttccaagatgcccttgctcctcctccagctgcacaaaccccaaccgcagaccagcgtgttggccagttcctgggcccacaggcctatgcggctcctcccatagccctcttcctccccctcgccctcccatccgtcactgttcccccactcttatctcgagtgctgcttggtgccaccaggccgggccaggcccagctctcccaggacctgacccaggcaggcactcagcaggcacaagccgcaaatgggtgctccctttccgtgcggccatgtgaggttggtgtctcggaacacggcaacttatccgctgacacaacggtgggagacgcggctgcacagaacatgttgtgtggcatttatagaaagtgccaggccaggtatggtggctcctgtctgtaatcccagcattttgggaggcccaagagggcggatcacctgaggtcaggagtttgagaatagcctggccaatatggtgaaaccctgtctctcctaaaaatacgaaaattagccaggcgtggtggtgagtgcctatagtctcaggtacttgggagactgaggcacgagaatcgcttgaacccaggaggtggaggttgcagtgagccaagatcttgccattgcgctccagcctgggcgacagagtgagactccatttcaaaaaaaaaaaaaaagaaaagaaagttccagaacaggcaaccaacgctgtctgtgccaggaggtggctgccctggggccagggagctgtgactgcaggtgctttcctgagcacatggaacagctcgggggtacgtcaaaagggactgaatccacaaaacgcttgcaggaggggttccagaagaaacatgctgggctgggcatgagcgagtgtggccgccttggggacctgggaccccaactgtcctctcccctctcatgcatgtttcaaatcttctgaaagaagctgaccccttggggtggggacctgaggggtccttaccaggaagaagcgtgcctgttcggctgtgagcctcacgctggcctccgagtccaggtggaagacagccaggtggtcctgggtatcccgggcagtgccccggcacagggtgctgtggggggagggtggtcagcaggtggggcagccccgggcgtgcccttactccagccccaccggctcccactcacctgtacaggcaggggtgcagggagagcagcccctgctggggggcccgctgtggggtgtgcacggccacgcccacctcctggcgggcatcctcattggcgtactccaccactagggcatagcggcctggctgtggcactgccacttgaagctggacgtccacctgcagggaaggcagggtgacgggaggcccgccacccctcgcccttcccacctccctcccctcccactccagcgcctccctgaccccagggcctgcccttcagccgagtcccaccctggcccggacatctccaggcaagtggtgggggctgagctgtatgtggaggccacagccaatcctacatacagacaggcactgaggtcacacatgcaggaggcaggaggcaggaggcaggggcgccctgcctgggtgctgggctccattgcctgaggcagcgccctgctcctataacctgccaccgccacaggacccccagcccccaggccaaggtcctgcaacacccattgctccgtggggtcccaggacacgcacatcactgcccgtgcaggtgatcagtggcgggtgcgacgggctgagctgctccgtggggcagggccggggcaggctgttgtcctggcgacacagggcctccagcccggcggccgaggggaagccatccagggggaggtgtgtgtagaggaggcagctggggggacacaggccgtggtcagccccaggtccacccaggtccccagagacagcctgagtgggggaagccaggcacagtgggggtccaggaagcccccaccccggtcccaccgcacgcatggccctcacttgtcgccagactgctgggcagagggacggtatgtgcaggcctcagtcacccgcagctgcaggagcgccgcctcgtagtatgcgctaggcagcagaaccacgtagtcctgcagggtggaggtggtgctgagagtggtgggccccaccccctgacccggcccccagccctcactctggcccctgcctcaccaggagcaccccttcggcctccacacgcagggcccaggtgccagggttcagcacaaagggctctccgaagcccctctggggcacggtgatgaaggcaggctccgtgctgggtgggaaggccacgggctgactctgtgctgtgcctgggcgggggcaggggtgagactcctgagcccagcccttggggccaccccaggctgcaccccctacagggttggggataggctggtcctaccacccacatgagccagaggaaggtggcggggcttgggagtggggtggggtggggtgggctgggctggtggggcaggggctgtggcccagggaccccactcacagttggcgcaggtggccgacctgccctcctctcgcacagagacccgcccgctcacactcatggccccccggttgacgtatcggaagacgagccagaaaaggtcaggggaggtcaggttcagcctggccacgatcctgggctgggtgggcatggagcgtcgggtcactctccctgaccactgccagcctgaggcctgggccttcaaggggcctgcccacccctccctgccagccacgcctggctccacttctaggctgagcctgggagggggagcacagcgcccacctggacaggtgccatctgcgcgtagcccctccagctgaagttctcgaactcgagggggttgaagccaaagcgcacggcgtgaccctcaggtgtggcagcctcctccagctccaggcgcaggtggtgcaggtccgggaggtagtggtccctcgcaggcctggccacagcaggggctggtcaggtgcagcttggccatcctacctagccctgcacagcggccccgggtctccagggagggtgaggcctcacgtgggcccatggtgagggacacggagaggcccggaggacaagctgcctgccccgctccccaccacccagtggggaaggggtacccactcgctgcaggtggggccctgggtgttggggcggcaccggcagacgcccgtcctcggttcacagctctggcccagtgcaccgccaatgtcacaccggcagcctgcagggagaaggtgggaggtcagaggctgcctggcccccacccagcctcaggggcccctcacagccagactgagaagcctgcctggggctctctggatgatggagagtcagggctcagggctcagggctcagggcgagggcgagggcgagggtgagggcgctgggatctgttagtgccgtctgcccaggtgtaggacaggggagaggaagccacgcatctgggtgggagctgcaccccctctcccacaccctggcacaggctggcaccaaggggcagccatccatcacccgggcttcatgctgcccaggctgcacttgtccctccgggccttgggttccccagcataaaccgaggggaggcagggctgtggtctgggacgagcgagtgggcactcactgcggcagccaaaatagtcagcctgatccagtccaaagaagccatccttgcaggacgcgcaggcctggccgcacacgtggggcttgcagaagcactggccggtgccctgggggccaagggaggaggtgaagtggggcaggggagggtcctgaccagtgtgcccccaaatcccccacaccttggtcctcagactcaccggctggcactcagcaactccacccagtgtgcccctgaggtcgcagctgcagcctggggagagcagggcaggactcagatgcttggtggggcaggagagcctggctccagccccccgaggaacccccacaccctaacaccccctccagggcacactcacaggctccagcacccccaggagcccctgcaccctgacactccctctaggatacacttgcaggtacagttccccaaggaacccctataccccaacactccctccagagcacactataggctccagccccccaaggaaatcccataccccaatactccctctagagcacactcagactccagcccccccccaggaacccctgtaccccaacactccctccaggacaccctcatgggtacaatcccctgaggaactccacaccccaacattccctccagggcacactcacgggtgcagcccctccgaggaacccccacacactaacaccccctccagagcacactcacaggctccagcaccccgaggaaaccccgtaccccaacactctctccagggcacactcatggactccagtcccacgcaggaaccccctgcaccccaacattccctccaggacaccctcatggactccagtacccccccaggaacccctgcaccccaacattccctccaggacacactcatgggtgcaatcccgaggaaccccacaccccaacactccctccaggacacactcatgggtgccatcccctgaggaaccccacaccccaacactccctccagggcacactcacaggtgcagcccctccgaggaacccctataccccaatactccctttagggcacactcacaggctctagccccccaaggaaccctcatacccccaatactccctcagggcacactcgcagcccccctgaggaaccccgcaccccaacattcccttcagggcacactcatgggtacaatccccgaggaaccccatatcccaccactccctccagggcacactcactggctccagcccctccaggaaccctgcaccccaacactccctccaggatatacttgtgggcacagttccccaaggaacccctgtaccccaatactccagggcacactcacgggtacagccctcggggttgctggggctcagtccccagaacccaggtttgcagcggtcacagctcggcccctccacgtgagcccggcacatacagggaacctgtgcctgggagaggacaagactgcaggtcagagcgggcgccctgctctcccacccacaaaccatagagccatagagccctgacaaggggtggtgagggctgagggccctcacctgtgactcacaggagtcacctgcagtgggggcagaggaccagcctaaggagcagacaggccctggggttgccatggcaactgagcagcaggcaggaagccctggtctcaccggactcgggacttttagcttggcctgggtcctcacccatctcccacacacgagcagacttgggctcacctcaggaagggcaggatccactggggccagaccggcagggtggcaagagccagctgtgaagagaggaccatgcctcggtcatttcccagtgaccaacccggaaggccaagggtgtcccaggcccagccagaacccacggtcccacaggagctgaggaccagcacaggtgcctctcatccacatggacggcctgaaaacacgcacctccctgctccctccgcagcaacggacgtgccatcccaccacacagcacctgctcatggacatgcacgcaaacgtgcaccgcgtggggtacccgtgtacattccacacgcagtgtgtgacacacgtctgaacaagcacacaaacgcacgtgaagatgcacccactacacgtgcactaacacacccacacgcccgtgaaaggacatgaacacgcacacccacacttgagacacgcgatacgcgcacccacttatgcgatacgcgcacccacttatgcgacacgcgcccacatgcgacacgcaacacatgcacccacgtgacacacaaacccacttacgtgacacaggcacccacacttaggtgacacacacacccacacaagcaacacatgacacccgtacacacacagaacgcaacacatgcacccatacgagacacgacaggcgcggatgcacagcacgcagacacgggcagtacgcggacacccctgcacggcatgtgaacaaggtgcgaacacagagcgtggggacgcagtcgcagtacacacagcaagatgcacgtgaacagcctcacaggaaggcaggcagcgtgtgaacagcacagacccacacacaggcccggcacctggtgcacacagccacctgcctgctcaccttcgcagtaggggaagttgtaggcaccgggcacacatgtgtcacaccgcagccccgtcacacggggccggcagctgcactgcccactccgggggtcacaggctgcgtgcagggagccttcagcagagcagtggcaggctgcagacaaggatagctgtgggcacgcagtggagactgcacctgcctccccaccacttcctccctaggcactcacggacacagctggggaagccgtgaaagccggggctgcattcctggcaggcagtgcctgtgtagccggggcggcagcggcacaaacctcccgccccacagagctggtccagggctccccgagggtcgcaggtgcatgctgcagagggacaatggggtcaggccctggcgccatgtgggtggcagaaccccttcctgccctgaccctctgctcaccttggcagttggggaaaccatggtagccagggcggcaccggtcacaatgaggtccagcaaactcaggctggcataggcagcggccggcctcatcgcagccctcgggcaaggttcctgcagggctgcagccacacactgcagagcggagcgggtgtcacggtaggccaggcccacgggcctcccctacccacgcccacgtggagaggcaccactcacactggcagagagggaagtgaaagtagccgggggcacagcgatcacatgtggccccctcgaagcccactcggcacctgcactggcctgtgtcagggtcacagcggtcatcggccactccagggctggaacactggcaggctgcaggaaagggtggcccacatgcttggtcagaggcaccaggcctcaggtgtccacctcgagcgcaggtagaggttgagcggggagaggggactcacgctggcagccggggccgtagaaccctggcgcgcagagctcacaatgggtgccttggaagttgggtttgcacagacagcgtcccacccttgggtccttccggcaggcgttgccctgggtccctgccgcgctgcagtcacaatctggagggtggggacaggcaggggagtctcagatgccctgcagaccccagtacgcccctcctggcaaaccttccctctccacaaactcattttcttacacttttacacaacactaactagaaaataaaataataaaaatcccagcaagggctgggtgcagtggctcacgcctgtaatcccagcactttgggaggccgaggcgggcagatcatgaggtcaagagttcgagaccagcctgaccaacatagtgaagccctgtctgtactaaaaatacaaaaattagctgggcgtagtggtgcacccctgtaatcccagctacttgggaggctggggcaggagaatcgcttgatcctgggaggcggaggttgcaatgagccgagatcgcaccactgcactccagcctgggcgacagggtgagactccgtctcaaaaaaaaaaaaaaattccaacaagggagaggcgtgtttgggaaaacagtgatgtgcaacaaagtcaggccaactatcaaaacgcttcattagttatttcttacgtagattcctagttagctgcaagcattaacacaaagagaaaatacaaacaaatcaaaactcaaaacaagctgcaaaacaaattatagtttcttttttttttttttttttttttttgagacggagtcttgatctgtcgcccaggctagagtgcagtggcacgatctgggctcactgcaagctctgcctcccgggttcacaccattctcctgcctcagcctccccagcagctgggactacaggtgcacgctgccacgcccggctaatttttgtatttttagtagagacggggtttcactatgttagccaggacggtctccatctcctgaccacgtgatccgcctgcctcggcctcccaaagtgctgggattaaaattatagtttctttagaaacaatgtcaggtgttgggaagaaggtagaaagaatgtatcaaatgtcttaacttacgcatgaaaggagggttgtgagcacgcttcagttttgttactgatagaaaaataaaggttcaatacttgtcaaaaatgtaagagtaaccactggtcagaccagaacacagaaagagagcttgcaaaccctccccagagaggaaacagtagcaaaaaccaaaatcaaagcacgttttcttgctctaacttgtgaaagtcaggaaaggaaatgtttcagcagaaaaggagaaatgatacaagggcaggagccagccagaactgacagaggcaaggacgatcgtggggctgcgctgtctccttcatgagataaaaaccgaagacgtcagcgtgaccaagaggaaactccagccatagcctcttgaaagagcgtaccttaaaccaacgcctcagacaggtggtaaaccgagagctgtgtgcagggagctggggtggacgcaaacacagaggagtgaggacggaaggcacagcggtaacgagacagagggaagctcaggcatgtcacccaacgggcagcagaaacgaatctctaggagcaggtaacgtgtcctggaggtgagggaagctaaaactattaaaatggcaaggagaatttggcaaaccagagtcagagagagacaaagactggatggagatacataggtagactgtgacagctcagagggacagaaattgagcaagggtactgtgggtttgaagagcataatgaacaagcctcctttgtttttttttttttttttttttttgaaatggagtttcgttcttgttgcccaggctggagtgcagtggcgccatctcagctcactgcaaaccctacctcccgggttcgagccattctcccgcctcagcctcccgagtagctgggattacaggcatgcgccaccatgcacagcttattttgtatttttagtagagacggggtttctccatgttggtcaggctcgtctcgaactcccgacctcaggtgacctgcccacctcagcctcccaaagtgctgggattacaggcgtgagccatcgcacctggccacaagtctgctttaacatgccaaatcggtactccatagagaacacacattcctgtccaatgttcctggaacaatctaaaagtggtcacattctggattagaaacaaagaaaatctcaaattccaaaaacaaaaggcagaaactgccaggcgcagtggctcatgcctgtaatcctagcactttaggaggctgaggtgggtggatcaactgaggtcaggagttcgagatcagcctggccaacatggtaaaaccccatctctactaaaaatacaaaaattacccaagtatggtggtgggcgcctataatcagtcccagctactcgggaggctgaggcaggagaatcgcttgaacctaggaggtggtggttgcagtgagccgagatcgtgcaactggacgccagcctgggtgacagagtgagactctgtgtcaaaataaataaataaataaataaataaataaataaataaataaaattaaaaaataaaagtcgtcacattctaggttagaaacaaagaaaatctcaaattccaaagacaaaaggcagaaactatcagtgtgccaagtctaaccacgatgcagcaaaaccagaactgcacaccacgaaaaggacaggagggaaacctcagcaccttgaacagtgacgggttgaaagaaaataaaaccccaaatgatagactatttaaaaaaaacacagcaatgaggacaccccacatctcaaactacaagatacctagccaaaggtatactctgaggaaaatttatagctttaaactagagtttcccagcctcaggactactgacagtccaggctggataactctttgttatgtgtgcaggagcagtcctgtgttgtaggaggttcccagcatccctagcctctacccactggatcagttacatccatcaatcgtcacaaccaaaaatgtctccagacatcatcgaatgcttcctgtgcatcaaagtcaccactggctgagaaccactgctttaagcctttttgttgggaatgaagacagactaaaaataataactcaagaagctattttaaaaaagtgataaatcaaagaaagtggattaaagaaattgaatattagaaaggaaaatctctcctcccaactaaagaaagaaaaacctcagcaggtcttatcaagagaactgcacctgtacttcgaacagaccaataaactcaacgaacctctgttaggtctgatcaaccaaaaaaaaaaaaaaaaaaaaagaagaagaaagaaaataaaaataaaaatagacgagaatagaaatgaacagaaattttaactttataacaggccactgtgcataactttatgtcaatacattaaaaaatccaaacaaaatacacaatttgctaatacaaataatcaaacctgacttaagatgaggaagaaaactggccaggcgtggtggctcatgcctgtaataccagcactttgggaggccgaggcaggtggatcacttgtggtcagagttcaagaccagcctggccaacatggtgaaaccccgtctctactaaaaatacaaaaaattggccaggcgtggtggcaggtgcctgtaatcccagctactcgggagactgaggcaggagaatcgcttgaacccaggaggcagaggttgaagtgagccgagatcgtgcaactgcactccagcctggacgacagagtgaaactccatctcaaaaaaaaaagatgaggtagaaaattgaatacaatagccacagaatacattaaaaccttaatttaagatctctgttgaaaaacaggtatcagagaccaggctcagtggctcacacctgtaatcccagcactttgggaggccaagacgggtggatcatgaggtcaggagatcgagaccatcctgctttaacacggtgaaaccccatctctactaaaagtacaaaaaaattagccgggcgtggtggcgggcacctgtagtcccagctactcaggaggctgaggcaggagaatggcgtgaacctggaaggcagagcttgcagtgagccgagatcgtgccactgcactccagtctgggcgacagagcgagactccgtctcaaacaaaaacaaaaaaacaaaaaaaaaagaaaagaaaaacaggtatcaggactaaagggttttgtaagtttgaccagacttttaacaagtaaataatttctgtgatttttaaactgattgggagcataaaaaagtgtggatgatttcccaagtattttacaaaaccaaaacaatctcacttgtgaatttagacaaaataaaatattgatgttcaacactgtgtccccattaggaaagacaatacaattcattgtaatgaacacattgaaagtgaatactgtacagccacaggtaattactgagtgcttactatggcccagtagcgaaaagataaattgtcagtttacaccagggattagcaaactagtctatggactcctcgcttgcttttgtaaataaagttttattggaacgccgccaaccccactcatgaatacgcgttctatggctgcttgcaagctacagctggtaacggtagagctgaggagtttccccacagggaccacacggccctcagtctatgacatttaccgtctgggccttttccgacagtttgttgacccctggtttacactattgatgaaaaactaaacatttccacataaaaaaaccatcacagaaccagcagacaagagaattcctgggtaagggaggagcatctacatccgactcagccagagattcggtagaacaacgtgggcagattcacctcaaaatttacaaaatcaggacacggaaaaaagctcccccccaaaataaggggcaaatgacccatcaggagaaaaacacacaacttataagaaataggtgatacaggctgggcgcagaggcttacgcctgtaatcccggaactttgggaggctgaggcgggcagatcccttgaggtcaggagttcgagaccagcctgaccaacatggagaaaccccgtctccactaaaaatacaaaaattagccaggcatggtggcgcatgcctgtaatcccagctacatggtaagctgaggcaggagaatcacttgaactcggggggcagaggttgcagtgagctgagattgcagcattgcactccagcctgggcaactagagtgaaactccatcaaaaaaaaaaaaaagaaagcactcgaaaagtcaagaagattcaagcttacagagtagtcaaagtgcagctaaaaatgacacaatatcgtgccaggcatggtggttcatgcctgtaatcccagcactttaggatgccaaggcaggcggattacctgaggttgggagttcgagaccagcctgaccaacatggagaaactctgtctctactaaaaatacaaaattagctgggcttagtggcggatgcctgtaaccccagctactcggtagactgaagcagaagaatcgtttgaacctgggaggcacaagtggtagcgagccaagatcacaccatcacattccagcctgggtaaaaagagcgaaactccatctcaaaaaaaaaaaaaaaaaaagacgtcatatcaaatacaatctaagtctaagaccccactcactgggaaagatgccatgcttgtatgtcccgtcatgaaagggaaaaaccctaccaactagactgtgatatgccatcaagcaaaagacgcatcccaattccagaaacactaaaaagcaagggaacatggctctgacttgagaatattttttgtctatcaagccaagagtgatagactgctatgtggtaatggcaatgatttggtcagcaggtgccatgctgctctgtggctgtgactgtatgctgggagactctttttttttaaatttattttttgagatggagtctcgctctgtcacctaggctggagtgtgatggtggttctcagctcactgcaaccaggttcaaatgattctcctgcctcagccccccaagtagctgggattacaggcacgcaccaccacgcctggctaatttttgtatttttagtagaaatggggtttcaccatgttggccaggctggtgtctaactcctgacctcaggtaatccacctgcctcagcctcccaaagtgctgggattacaggtgtgagccactgtgcccggccagttttctacctcatcttaataatgctttatcacagcataattaaaaaaaaaaagaacctagatttccaaccactgggggttgtttaaataaatacttcattagtccctatgaaatggaccacaagacaatgtgtttacaggattgtggttgggatgtaatcacaggacagggtgcagagcgcatgacgaagcttgtgaaagagaagtgcttgtgtacagagagcattcaagcgctgtgcagagctgggggaattgtggataactttttgtttttgtttttctttttgagatggagtttcgctctgttgcccaggcgggggtgcagtggtgcaatctcggctcacagcaagctccgcctcccgggttcaagcgattttcctgcctcagcctcctgagtagctgggattacaggtgcccgccaccatgcccagctagtagagacggggtttcaccatgttagccaggctggccttgaactcctgacctcaggtgatccacctgccttggcctcctgaagtgctgggattacaggcgtgagccactgtgcccaaccaattttcttttttttttttttttctattttttttttattatactttaagttttagggtacatgtgcacattgtgcaggttagttacatatgtatacatgtgccatgcccagttttcttttttgaaacaaggtctcactctgttgcccaggctggagtgctgtggtgtgatcatggctcactgcagcttcggccttccaggctcaagcaatccttccacctcagcctccggagtagctcgaactacaggcacacatcactacacccagctaatttttgtatttgctgtagagacagggttttaccatgttgcctgggctaacttttttctttggctttatgctgacctatatttccgaaggttttccagtgtgaataggcataatttgcataaaaagaaataagccaaaaataaagtgaccaaatgaaaatcctccctttctccaggaactttctgtgaagccgcccccatggctccagggcaggccggggacctgggggcctcaaggacacttactcacaatctggccggctggcagcacctgctccctggtgtcattggaggacgagggcgtcgctgaggggaagagacacgcatgttggccaggtctgctcagaaccctagcaccctacaccccctgccacccttggtctctcagcacaatcggagatgcaggcaggataacatggtccatcccggggaacccctccaccccctgcagggctcccggagtccagcaggcagtggtgtctgtttggatgcccctggcaggtgctcacggtagcagcttgggaagcccgtgaagccctcggcacacacgtcacaccgctccccagagaagttgggccggcagtagcatcgacccgtcaggtcctcgcaggtgccatccgtgaagtcggactcgcagttgcagcctgggcaggggcaggagccgggtaagcctggagctaccaggactcaaggggtgggctccaagatgtggcagtctctacctccccagccagggccatggggatgagggctacagccaggccccctggggggacatgagggctggggacccgccccgtggcctgggaggctccttcctgggctggcctggaagctcaggacatcccctccaaagcagccccaaaggcccaagaacacctctttccaggcagaccctgagacccaggacacccgcccagctgagcccactcacggcggcagacgtggggcgagtcgagagggtggttgggagagcggtagaagccgggcaggcagcgctcacagttgacgccggtggtgtggtgctgggagtgcaatggccgttgagtctggggaggtccctgccccacctcagggccagcccattcccagccctctagcccagcccacctggcagtcgatacagacacccccaccctgataggtgccatccaggctctggctggcgcggcgccggtccacctcagggtcgtagtaacagtcggtggcatggccgtagcagttacaggctagagagaggggagcgcagctgttggcacgccctccacaggcccgggcaccggggccctctcatgggccagggtgtgggcaggacacacgtgtgtgggaggaggcactcacactggcactcgttggcactgttggcagtcgcaggcttccacggctgctgattgaagccggggcagcagcggtcgcaggtgcccccgcaggtgttgtgctggcaggtgcactgcagcctgtggggtacacaggaggggggatcaggcccatcctggaggcaggtggcaggtgctcagtcccttccctgaaggggcctgtgatcccctcgatggcttggcttgccacatggacacggccccccgctgctgtttctccagctgtccggcagcaagcgctcgcccagactcagcgtccccgagcctgtggctctgacgcaacttccccaggctcagggaatggacacaaggaaagaggcggtggaggacagggtctcacagggcctttgtggaggcgggactggggagcaggtgtgcactgaccgggtggggcctaggacagggcacctcaggggtcagtagagtcccccttgcctgcaggtcaggatggagacctgcgttctccaaaactgagttatgccctttccacttcggccaggactcgagcgtaagcccaaaacctccctgagccagaagggaaaggggtccatttgcaccccccaaggctcagatttcgcttagcaggcaggactcctaggcatcctggtcacctccctagggccaagtggccaagaactgcttccttcttccagctggggtggacactaagtcacagggctggaatcttgccttacgtcccgtgggcagggtgacagctggagagagacaaggcctgaggttggaagcacctactgctcagtattagccagaccacagcgggagtccctgccccagatcaggctctgccggaggctgcagggccgtgcgttccctgagcaggaccccagaagtcagtccagtccatgaggattagacccagagcctcaaatggtccagctctagtcctgtcctccacggggcccacctcacagggcctcgggaatcaatactgctttccctcagaatccagaaacatctgggagggccataccctcaatgagaggaattgggaaataaactgcccgtcagcacaggtgatcaacaaagaagctgctctgtcgtcacaccagccccaagtacctataagcaagggcctgaactggtgttccatttttcaaaaatccacatagtcaagaaattgataggaaaagtggtgccgggctggcgataccctggggtgtatagcaaaagctctcccaaaaccatcccaatcccagggcacgccagaagcacaaagataaaccctgctaaagaccttgcagagaaacaatgtggcaggtcagcagaaagagccccaagaacctcacaaaatggagtaatctagtagaagccagggaagaatgttaaaaatggtcataaagaaatctaaaacataggccgggcgcagtggctcacgcctgtaatcccagcactttgggaagccaaggcgggtggatcacgaggtcaggagatcgagaccatctggctaacaaggtgaaaccccatctctactaaagaaaaatacaaaaaattagccgggtgtggtggcaggtgcctgtagtcccagctactcaggaggatgaggcaggagaatggcacgaacctgggaggtggagcttgcagtgagccgagattgcaccactgcactccagcctgggcaagagtgtgatactctgtctcaaaaaagaataaaataaaataaaaaagaaatctaaaacataataataaaaaaaataacactatggaaaacaggcagatgtgaaaaagaaccaatcagaacttctagaaatgaaaaatgaaactataaaattaaagactcaatggatgggctaaacagcagacagacacagtggaagagagatttagtgaagtggaagaggagcaaaggaagctatccagaagacacctcagaagataaagagagaggaaatagaaattatgagaaggaaaccagaaggtgctcctgtatctaatggggactccaggggaaaagaggtaggaaagggagccaacagtcagaaagaatggccaaggatggtcttgaattaataatgaacacatggccaggcgcagtggctcacacctgtaatcccagcactttgggaggccgaggcaggtggatcacgaggtcaggagatcgagaccatcttggctaacatggtgaaaccccgtttctactaaaaatacaaaaaaaaatagccaggcgtggtggtgggtgcctgtagtcccagctactcaggaggctgaggtgggagaatggcatgaacccgggaggcggagcttgcagtgagccgagatcgtgccactgcacgccagtctgggcaacagagtgagactccatctcaaaaaaaaaaaaaaaaaaaaaaagcgtgagtcctgagcaagaaaaaaatcccaatcctcaacacatcacaataaatctgcagaacaccaatggcaaaaagaccataaaaagtcctggagaagaagatgacccacagaggatcagcaactgcaaggacaatggactctcccaagcacctggagaggtgaagagacagtcaaatcatttctccaaagtgctgagagatgcagctatcaaccacgaatcctacagtcagctcaactatcattcaagagggaggacaaaacagccgttttcagacaattccggatagactgtcatggaatagaaaaactacagggtgcatttcaggaaggaggaagcagcaacccaggggatggggatggggatggggatggtgggggtgatgggggtgatgatggtgatggtgatggtgatggtgatggtgatggtgatggtgggggtggtgatgggtgggggtgatgacggtgggagtgggggtgatgacggtgatggtgggggtgatgacggtgatggtgggggtgatgacggtgatggtgggggtgatgatggtgggagtgggctggtagtgggggtgatggtttgggtgggagtaaggtgatggtggaggtaaagaggcagaaaattgctggctgatgacatggagcccccttccctggaggagaggtggggtggcgggtaaagggtgcagggagaacatgggcaggctaatgttttgggacactggtgggtgaccaggtcctggtaacagaggctgtggttccatgaaagattcccagtcacccctgcttgcacctgcagggagagctgagctcagtccacacccaggtgcggtgagtcaggggatggcaatgtcttccctgcaggccaaggcaagccccggctcccgcgcccttcctctccttggaggcccatttggctgcctggtgggttccactccctgctgtcacgagctgcgtccccacttggcacttaatttcccaggacaagttagctctgctggagctcagcacctgaagctgtgctggcagcaacaagtgcctgggtgggtccccagggcccacagctcctggcaaacagcccaagtcctccggctcaggtgactgtgccactcctcccctcagacccaccagccacatccgaaggggcccagggctcccgcctctgctcggcactggccgtgagaatgggagtgaacctttgtcctgtctgagctccacccgcctccccacctcccctgtaaactggagcgtggacagagcagtaaggccccacagaaggcaagggcgggtcccaaatccaagcgcatgaaagttgggctgctcggttgcaggcactagatgagccctgccagctccctgctgggggtccaggagcctcgtcacacactcagcctcagctgcaccactctgagtggcttctgtccagccccatgcctgcactgccaccctagggtgttacaccctccgggcaccacgctgagtactggtttgcgtgtttcccagctgcctcccccggaacaggtgctcctgaggccgggctggggtcccaccctgtgttcccattcccaggaaaacggcccagcgtgtgttaggcgctcaacatacagctgctggctgaaagaaccaacgaagggagggaggaaaggacggacgtgccctggggttgcttctccgcagaatgagcccggccctaccttactgaggactctgggtgaggcccaggaatgtgccggtgccagcaccagggctgctgcccatcctgtgaggggctcccgggaggtggatgctctgcagtgccctcggctgcccccgaaagcaggcacacagggcacagcagatgtggggtgttggctgcccccaccctgccatccccgtcctgggccttggtccctgcttgactggagtgaaggtcagggctggggcagcagggaagttgtctgttgtgtcctgaaaggttgggggagctgggcgggcacccccaaagtgaattagggctgcctcggcaggtagtgggcacctgtccattccgggggatgcagtcttggagtcggggatcaatcatccccattgctgactcccctccacagggccccaggtgtccactatggtgggaaggccagctggcctgggggtccggagagccccacctctgctggcagtagggcaaggccccccaaaccaagatagggcaccctggggaggctgcacatgccctggcctccacatcactgcacagatgaggaaactgaggcacacacggcggtggtcagtgcaggtcacacagacagcagggttgtggtgggccatggaaccaggtcacccaccctcaggttaggcaggggtgacaaggacaggcagggagctggggggggcctcacctgaacggggcctcacctgaatggggcctcacctgaacgggtccgtggggtctttggcatcgcaggcatccgcgtggccgtggcagacacagcggcctccgatgctgatatccttgatgctgtaataatactgcacccgcaggccccgtgagcaccaggcggccaggcctcactcaccctgagtcccgggtccacccggccagtccccctcccccgcctgcgccatgggcagctcacccggcgggtgaccgtggggtcccgcagcgccttccccatgagatggcccagcagcgtgttggtacgcaggaagcgcaggcggacgttggtggccttggtgaactcacgtagcagcggcgagtaggagaaattcatggcgcccggacgtccgttcaccagggacaccacgatctgtgggcagtatgcggtgacgccagtgtggccctagcccctgctcagcactgcccctcccgggcccacctttcccttctccagccccgctcggcactgcccctcccctacccacctctccgttctccagcccccgtaccgccctgcccctccccggcccacctctccgttctccaggggcacgatgcgtgagtactcggtggtgcagatggccgcgtcgtcccgtgtgatgcgctccagcgtctgtggcccgaaccgctccagacagtccctcttggaggctgcggggaatggcgggaggggagggcgctggatcaccagaaaagcctgggtccccgcggtgcccgggccccttgacgtctccgggccttgccactgaggctcccacaggccaagaggccgcgtgacagagaccacagctcactggctgaaggggcctggcccgttggactgcactgccccccaccgctctcccttgcacgctttgagtgcgagtgacccccctcgacgaccatcctcacccccttccttggggacagacgcctactgcccatcactgacccgcccctcccccattctcaggccagggaattttgggggacacgtgaccaggcctgccctattggggaggagcacccactcccaccagcatgactggtcagggtggcacggggccagggacggccagcatccgggctaggactccagtactcttgacgcaggtggctaggctggcaggaggtgaggtgggagctgccaggccccttttgtcaccacgggagctgccggtgcatgaagccatccagaggcagccaagagatggcaccagagattcctggcgccacagcccctggacttggctgtgcccgacgccagggacaggagccaataaatccccatgagccttcgggtcctcgtctgacagtcatgaccgcagcagccgggtgtgagggcagggctgggtattcggagaccttcagaagcctggtcacggagggcctgcccagggacccccctgcctctccccccaggccccacggcggcagagactcacaggcaaagaactgccagggctggtaggtgcggccgaagtccatggaccgctccagcacccagaggtccggccggggtgagttggcaaacttgatgaggacgtaggccacgtggaagacctgtgggccgagagggcgtcaggggagccaggggcgcctggattcccatgctcccaggggcctggctcattttctgcccctcaggtgaggccacagcaggggatgtggcaccctcgccgcacagggggcacctctgggtttgcctgtgtggggcagacgaacccaggggagagggctccccagggatggagatgagcccccgggaaccagccctcctggaagggctccccgcctgggctcgggaccaacgcgctgcctcctccccttccctgccgcaggagtttggggttcccccatggtcctgcaagctctgtggctgcagatggagcaagctagggagaggcctacctgcggcccaggcagggactggccagggtggaggcaggaacacaccccagtgtccccacagccctcacgtccagccaggcctggtggccagacagtggtccctgccaccaggcaggtccaaaggtccaaccccctagtccctctgacaggtcagcagctcctaagatggggcccctgcccccacctcacaccgggcacccctccccaggctctgctcagtcccatgctgaccagcccacagccaggggcccactgagcccccagggactgggctgcagggagcaagcggggctcagccttgcaggctgggggccctcttgaagctgagtctgcctcggagactccaccagcccaggcactggggcagtagcactgctgtggcccggtgcacgtcagggcagccctgcccagggcagaggaaagctgctccttcccaggcctccgaaaccccaagcccctgccccagccccaccttggctctgcctactttctccccgtgtgtcagcctgacctccacccagggacagcccatgtgtctgtgcctcggggctgggggacagcctggctcagtcttcacaggacgctttgtacacctcctcagagaagccttccctgactgcagcccctccccctaaccctcagctgcggacatctccccaggcccaggcccttctctccgcacaggccaggcctgctgactcccctcaggcctctgatcagcctgggcttccctccctccctccctccctccctccctacccatcccctgacaccctgccctcaggactccaggcctgagcctctcctgcccccagcagtcagtgctacccagcctcatatctgcacccacccgacatgaccgtgggcctccatgcctgcacctgggggtgcacacacacccgcccaacagtgaaacaccgtgggggtggctcctccatggacccaggccacaggccccctctgaaaaggtctctggtccctaaaaacagcccatggcctcaatggcaagaggctgcacccaggagcagggggggtcccgaggcacacaggagggggcggtgcccaagcagcaccccgccttcacactcatgcaagccagggctcagcccctgctgcagccaagtgctcccacccgccatagcctctgaggggagccctaggctccccctacctgggggcaaaggagggaagttgtctccaggccctgtcacaagcctggaggctccaagggagggtgagcccctccccagcccctctcaaacaaaggggaaagggctctcccaggcagaggctccacagggacctggcagggaggcggaggaaacacgaacctctcccccgcctgtgcgaggaggcccgggtgccgggggagagaggcaactcatggacccacagcacaggtgtggcctgcctgtcccggcccacacctcccctgacgggcccacagggtccacgatggagaccttgggagacctcagtactcagcccaactctttgtgggcggcagtggggaccagcccctcctctgctcacaggtgggcacccaggtgggccctaaaaaggccagcaggcctccgagggtcatgccacaccccagggccacccaccacacctcctcgggaccctgacccgccagtgcccactcctccggagagtttctccccacagcaggtacgcccgggaacagctgggtgctgttggccaggtaggcctggaagcctagggccccaagggggagagtggggtcccccagagctgcacaagacctacagtcaccccactggactgagccggactgagactgctgtggggtcccccatgaaaagaccacagacccctcatagcttcagcccttgggggcaccagctgcccagactccaggtagggggcaaggttccaggactccagacatcccaggtccaaatcccacccttctcggagggcttggcgttgcggggactgtgggagccaagcgcagccttccggggttggggcggggcacaggcctattcaccggctgccaggctctgaggtcatcgtctacctccctgtgggtggggggcagggagacatgccctgcccagcagggaggggtatgagcctcttcagggacagaccctatacccagccccacacccgggcctcagcagccccctgtgggcctgaccacaagcattccagagagccccaggtgggggccagtggcccctgtgcctggacagggaaggacccgctagaggtggacaggggcagggacacaggctgttctcggggagctggcaacacagcccctcccaccaaaggctccgaaggagactaaaggtcccgactgagccccctgggagccgcccccgctgttccctgagtgcctggatggaggctgcgctctcctcggcccgatctgtcctcctccctccccttcagcaggccagtcacatttttcccagctgagagcacttgcacaaatattgacttgaagacactgatcagcaggatgagggggacacagacacttcgccctccccacccctgggatgcacaggaagatcctggcctcctgtctgtcccccatcccaaccatctgtctgtcagacaggggccctggacagctgtcctcgagggcctggtggctgcacagatggtcacaggaagggaagcccgcgctggaggactcccatctgtctctgacctggtcgcggctcccagggccacaccggccgccctcgccatgacccggagcgagcgcagacccctggcttcgggaccgcccttccccctccacgccccgctcagctcagctgccagtgctgacctttccgctgctacatggttctgtgcagaaagaaaaaaaaaagtcttttaaagcaaaagccaaacaaaagctgcctgagttatttttaaaaatcggctattttggggcaggcacgtctccaggacggcagccggacccgcctctcagccactgcaccctccagtccccactacccagcttgccctgggagggccacggttcccagaggaggcctctgcccggtgaccactgcctcacagggggtgggcaagagccccaggagtacggggcccaggacccagggcccaggccggctccaggcttcaggggttgtgcggccctggagcggacacttccccttcctgggcacagggcagtgggaagagctgcagagaggggcatcaggataaaatgcctttcatgagggcatgaaggtttgagcgccctgggagggaggacgccagctgctcctggagggcagcagccaccccgcagagacgctgagaggcccccactggagctgccccactcactggcgctccgaaggcaaagctgcggaggggactgagtaggtgctagggtctgggcagcacggtgaggactacagagaaactctggtggggctttcggggaccctggggatggcgtggggttgttggctagcagcctcctgggctgaggcacccacctcaccatggggtgggctgtggctggaacctccagaggaggggaggcggtgctgtcctgtgcccaaacccagctctgccctgacccatcttgggttggggagaccagggccaggtccaggtgcccgctgtgctgggtgagggccagtcagccttccccggcagcctggatcacagcggtctgtgactcagcccccgccctgcaggaagaagggcgttgtgccaattcccggggcaggaaaagcccctcctagccccaggcgtccgggccagcaccctgatcgcactgctcggacagggcaccggggcacccagccccctcgatgcccagagtcctgggccagcccagcccttgcccgctcctgctgtgtgcctcccctcgaagagaccccatctggaaacgtagataagccccacagcaggggcggggcggcagccgggagcatctccactggcccccagctgggtgaataagcacggcggccacacaacctatcaggggtccggaaacgtgccccacacagacacctctcccagagggacgtggagtggaaaagccgggggtttccacagcaagcccaccgctgggaagaaaaataacaactctgaggccagaacccccaactctggggttggacgccgccatgcccaactacagatgtcctaagcaggacaggaaaacttccaggagtgggcggggggacaggagctccccagctggagggagaggatgggttcccagccagggggctgcccgcacctcaacagagctgggcctggggtggattcagggaccccaaccactgcagcccaagctccaggctccctccctgcagcccagcccaggtcaggccagatggtcagccggggacacaggaagtggagattatcccaaggggacccctcggcctgaaacccaaacagtttcgtcttcactgagctgtgttgtcagaggccaatgtggtggctcttgtttagaaacagacagaaaacaggaagcctttggggaccaccagggcctggggggtctaggtgggtgctggggcatctctgtgccctgagtgccaggtctggccgtgcagccaccaagggcaagcatggcgcgggggtgcggggagaggagcggccccatccccaccttggcatggcagccccttgggccgtgtcctccttccaggacacgtagagggagggttttgccgtctatcctgtgccaggggaggggagtggtgcctcccaggacccccgccgtaccccccagggagccctgctcaagtggctgcgtctggttcagcccgtgcacctgtcccggccgccgagctctgtaactagagcctggccgcagctgcacttcctgtccttccctggacaacccactgaccgtcctggggcactggccacatggctgagtgcccaaccaggcccagggagccaagccagtggcaccctggaccagtaggcctgcccagggcccaagccggccagccagagagcaggcagtcctgaagggtgaggcagcctgggcgcgctgggcctccggcaggtcctcctcctgcggtgctcctcccatttacagaggaggaaccagcccgggaacccagactgcagacagcatggccaaccccacagtcctccagaccccagcactgggaccttgggcactccacactggccctgaccctctcataaccccacctcagtttccccaagtgcctagggaaactcacactccagtggccaatgacttcagcagagctttgcctccttgtacccccacttggaggggacagctgactgcctcccctctccggccctacctgtccactctgccctcccatgggtctccaccatccccaggggcacaggccctcacctggcactgctcgcccccaaccaatacttctagcctcatgcctaactgcccccttataccctgccagccccagttcccccacaccttgacccccacctgggcctccccatttgccctgcagctctgggcctcggggactgggacaaagccgctaccccacctgtagcacctgcagcgtggcctgctctacagagaacaaagcaggggcctccctaccggaagggggcccgtgcgtcctcactcctcatctgagggaggcgggaggcaatgccctcctctgctggggagagccccgcccccacggtcaggccacccaggggccgactggagagggaggggacacaggccagagccagccccactcaccctgcccagctccttacaacctgggcccgctgggctagcgtgctggtgtagtggggcaagggcctggaccctgcggcagagccagggggtgggggagctcaagccaggacccgctggccatgtgcctgggcagtcatgaacgcgctcacccttccctgggcctggggcctggggcctggggcctgggtgtggttctcggaagaaggagcctgaggccagtgatgtggccgctcagttccagaagcttccggaggatgcaaggagatacgcaagaaccccctagaaggaccccctggggaaggtcacgtctggaactcggaaactgccccctgagtcaccagtgaccagcgctggagcctcttcctgaggccccacccttggagagagaacccctccacggctgggcgcagcgggacccaggccaggagcccagctggcactcccgggggcccaggctcagctgcttctgggtggacaccacagggactagtctcccctcccctgcgccagcccctgccccaccgcacaccaggggtatgagatccgaaccgtgatgcagcccaccccgccctcctcagccttccaggagcaggaagccttcccgatgcccagtgccagccgcccccacccccgtcccagggcatccgctccagatcccagaacaaaggctgctggcagcccgctgcagggggagtgcccggacccacccgccgctcagcctggcttcctgatggaggccccagccccgccccaggatcagccctgaagcccaggaaggacatttccccaccccactccagggagtccctgcccccaccctgaccaaggctggcagccccctggcctaggccgagacaggggccttggtagatacatccacgtggtcaggaaagtgggtgagaaggaaggaagacggtgcaggtgtggagggaggaatgagcagacaggtggacagatggatggaaacaaggaataaagggtgggtgctgcataggtaggggggtgggtgggtggatggatgggtaggggtgggtgggtggatacgttgggggtgggtgggtgggtgggtcagcaggcagagggatgggataggataggtgggtgggtggagggatgggtgagtgggtgggtggagggatagatgggtggtgggtgggtggagggatagatgggtggtgggtgggtggagggatagatgggtgggtgggtgggtggagggatagatgggtggtgggtgggtggagggatagatgggtggatgggtgggtagaaggataggtaggtgggtgggtgggtggatgggtgggtggagggatagatgggtgggtgggtgggtggagggatagatgggtgggtgggtggagggaccacttcccaggtggagtggaaagggttcctcttccctccgtatcattttacagttggtgaaactgaggctgtgagaggcaagacgctcacatggcggaacctgatttctggcccagaacaatctaaaagcaaactggcttcaggcctgaagtttccagcccagttcatacatgtgcaccgaggccgagagagccccagagccaaggggtggtggagcccaggctcgtgggtccgagtgtcagtcccggcttccctgccccacccaggcacatcgggcactgcgcccactggctctgcagccaccctggggttgccgtggagactgggccatctcccctcccccagcccagccccctagtttctcaaaggaggagaggcgggaagaactcgccagtgcccagcttcccgccccgagcagctgagaattcacacgtacgctacagccaaggtgggggcctctgctgctgtgccagagagatgagggacccccaggctccaggggacaggggagtcagatgcggggaaacccagtgagatgaaggtaaacaggcaaagccacacccagacccaggccagggcagggctaggggcctggcaggcaggcagggagcccaggacaggcaacccctccccagctccccgcccttctccacagggctctgcaagttcaggaacccctggaaattccaggccacttttggagcttgagccctcccctcactgcctgcccagcccgggccaggcctgcagaccaccaaggctgccaaaggtgcctgccccttggggccggccctccagccaggctccagggagacctcctctatctctaacaccctcgggacaatggcagggacagaggctcagacaggggtgaagaccgatgtgtcacacactgggactggggcagcggcggagccggctgggatgcaggcctctgggtcagccctggggcccccactccaggcactggctgctctcaggcccagcctcctccacctgccccaccactgtccctgacctaagaagcaccaggattactggcccattttacaggccaggacctcaaggctgggtacccgggccaagtcgcccccaatctgggggtgctcagggctggcagccaggcaggcccaccttgggggtttcactcttcgcttggaggcacccagctgcagcctcctgcttgtgcaggggcctccaaggccaaggagagcccagagctggggactggagagcaggcacccgaccccacctaaccctcagtggccgccacctcggcacaggtatcccaggaatgtccacttgcgccagcctcctctgcattcctgcagcccctcccgcacctgccaggaattccttaaacagcagggcgcctgacgcagggggcaccaccgcactgctcacagcacctccgccctcccagccccaagctgtctactcagcacccgcaaccaaactctgtggcctttggaaacacccccatgagcacccgctttccctgtgtcatggggacgctgaaagcacaaacaaaaggtgaccactgccgtgcctttgtccctgtggggactccccccaccaagtccttcgtgtccagcctcccaggccccaggtctcgctcacggtggagacctcgccttctggtcctgtggcccaaggtaggcccgacgggcacagacacagagatgggggctgcagcacgcaaagaagggtccctacctggcccaggtccagggtgacgttgacctcgttgtactccaggccgcgggacagcggtggactctgccaccagcgctccgtgccatcgatggcattgctcgcggggtgtgccttgttgctgttggcagccgtgcagatgtcacagtactggccctgcagagggaacgggagggtcagatagccgagaagggccggggcccccttcctcctccacagtcaccctgctgccccgagacaagtcctggtcccactgagctggttccacgcccagcctctgcgcccctcatccacttgctcagcaaacatgcgccaagcacctgctgctcctccgactcaggggatgtggctcatgtgagctgctcacggcgctaaggacaagaggaagaccagggtggagaggggcatctgccttgggtgggaaaatctcggtgggcctctctagcggggtggcgtctgagcactacgtggtaagggggggggtgtgctctaggcagagggggtgccagtgcaacgagccctgggggcaggaagagtctcacagtaaaccacaaggtggatcaatgtgtctagagccaaagggagcaagaaggggcaggagtaaggcaaagcatggctacccctccctgctggccctgccaggggctccagagaggcttggacaaaatgcagcaagccagggggcggaagggggagctgcagacagaaggaccgtcagggccgggatccaggcggccagacccccccccacctccagatcttgcccacagccttctggattagggtctccagagagacagaattaagctgttccggaggcctgtggggaccggccccagagtggacgtgtggacagcggcaggtgggcctgggcctcctggctgctgcttccgagtcctgggaagaggccaagtcacagtaactgctgagcctcaatgtccccatccaaagagtggggataaggctgcacctgcctggggccaccgtgaggagtaatggctcacacacacagcctggcagccgcttctgtcccgggcctgccatctgctgggggcctgtcctgcatgggtgagtggggaagagaggaggctcccagcagaatcctggcctgcatcctggcaggggaggggtagtgctgggagccggggcagggatgaggagagggggcagagctgggtcctggctgctcccccgcccccccaggaaaccagatctgctgtttgtccacacaaaggcgccctcccaggcttggggttgattgaggccccagaggcctcaatctgagtttgagaaagtcagcggccctaccccgcccagcctcccttggggggccagacctcatcctaggaggaggaggcaggagctggggagatgccttctccccacccccaggcccagcacctacagagggcccaaccccctcgcccagagtgtgccctctgcctccactgagcaccagggcaacacccggtacccctcccacaggctcccaagaccccgccctggtgtttggattgccccatctcagaccttgccccagaccacccaagatgcagctctgcagcccccagtgtggccactgctgtatttcctttactgcatgtatgagacctggaattatctgggggcctccccggggtcccccagagctctgcagtggcagggtccacaccctccttattcccgctgtgtccccagctcaccacctaagcattctcgtggatggggctagagcaactgaagacacccagttaagcgccacgacccctacccgcaggccgcactgcaagctttgatggtggcccccaaactcaagagctcaatgacagcacggcgcacacaggtcctgctcagggtggggccaggggctcctggagaaggtaggtgtgggcggcgccctctggctgggacagccggacctcccagggaaggctgcttgctggtcaagaccctcccagacacacgagcagcagagggaagctgggtggaaggttgcgggtcaagggtcagcctctactcttccaggaggtcagggaagcacctgctcagtccctgcctgggccagcgttggtccagttattgggaggcagttccagtccccattcggccactcactgagccacagaggacagggttgggaaaaccaggctcccccacctccgctgcggagggtcccgtgagaacagagctaggaaacagcagaagggccgataaggacttccccttccaatgagtcaccatgctggcctggctgcccagtccccaccttcccaggctgggccggccagggatcccctgatgcccacctggggctgtgagggccacaacctccccctgccctctgcctgctccagctgcccagcagggttcaccccgacccccatctgggatgcccagctaatgtgcatctcctacagagggtccctgagagcccctggcctgcagccttgagaacacactgcccagccccaggccccatagccttagtgagccccctcagatggagctgcggcttcatcgcctgggcacctcctgtgcctgcctgccttgccccaaccgcagctccactccagaccggccggcaaggacttctcacacgcccaatccgcggccagggcggtcagcagacccgcggctctcagatgaaggaggcatccaaggtcatacccgtccagctcacgtctaccagctgatctttctacatatctggcagcctcagcgggcactcactgctcagagctcgagactttggaagcgaagggttcacctctattgctagacatgagctgggcgaggccggctggtttctcatccaagctggctctgaggcatggagcaccacagcccacagctgccactgaaactgtggccacttcccaggctcctcgggccaagctcacagtctcaggtgaggggggccagcacgctgtgcccattttaaagacagcttgaggctgacagagggaagccacacagctgaggcagaggagaggggcgttgactacaggctggccctttactcacgagacgggggtaataagcccccacagaggagacagatctgagagggggcctgtggcccccagccacgcagcatgggcaggctgtgggggggtggtctgaggttcacagggcacctggagcctcccctgccagaacggcaaaatctcagctggggacactcagccaggccctctgtggtgaggtgtggcagcaggtaaggagacagtcacaggccctccgtcctgagacccggcccctctgagttgaccagataagggggcagccaggaggcacccaggttcccacagctaacccccgctggaccctgttctggctggggggctccaagcaggtgtcagcagctttccagggctcagatcccccatctgaagtgtgggcttgagacctcctatctcagaggactgtgctgggcttaaggagagaacggtgagcccagaagcctggggaggctccttccccctccaccagggccaagggggtggggcaggcagagggggcgggcccagcccaggctcctccattcatccccataacgtcttgctccagggccctctgcccccacccagcaaatctccagctactcgcccctgccccagcctctccttccgggaaggcagaggtaccagggaggagacagctcaggttacacaggccctcagggcccctagactctccctaaggtggggctgaggtggggaatgggcctagagcggccggttgggagccgttggagctgactttgctgctcctcacccaaggctgaccccaggcccaacctaagtctacagggccccaagagccttggttttcaggtgaggtgtccatgcatggagtccaccaacagaacccgcctacaggtttaaggcttgttggggaggggacatgcaccccagggggtcttcagggcctgaacccacatctcccagggagactgaagcccccggaccctaccacctgctgggcagagatgctgcccctcctgggagccacgtgttcccagccccagtcaaaacttcgcagctggccctcccctactttggaggtctcctcgagtccctagactcctccgagaggggctagtgggagcctcaggtggctggcccctcccaccccatccagaggccaacaggttccagcctgtcccgggtagggcggagctgcgccccctccccaccggcagcaggcggcggaggccaagtcccgccctccccgggatcccggacttggggccgccagggactgggcccggcccccctcccgccccggtcaccgcagtcgaactggaccggcgcccagccgcccccgggtccatgccggggactttaattccgccttcccggagggacgcgaagtttcccggccgagacggagcggccgggtcggggtgccttcttgggcccccaaaatgcggaaccagagagtccgcacctggactcgccccgggccacggcgctccccctggggtcgggccggtgttccgggtccgagtgccccgggaggaagccccacggcccgcccctgcgctcacccggatggtctggttggggtcgccgccggccacggggccccctaccagcttgcagtaaaggtcctcggtggggcgcggggagccgcgcgccggggcctcctctccgcaggtcgcggaggcggcgatgcgggcgccctcggccaggttgaagtagggcgggtgcaggctgaagccgccgcccgcctcctcccgcgcccgcgccgcgcccagcagcgccagcccgaccagcagcagcggcgcggggccccgggggccgcgaacacacagtgcgctccccgcgcagagccgcttcgccatcttcccggctccgggccgcgtccccgagctccagggacagcgcgcgcggcgggagcccggcgggtctgaagccaggcggccggcagggctcgctccgcccgcggacgtcaggccccgccccggcccgcccgagcgcccgagccccgagccccggggagaggtccggggaggcggggtgggggggggaaggagagaggagggggaggggcggccgggcggccttaacccttcggaccccggcccggccgcctcccggaaggggcacctgctggcctcgggccaggccgtgggacgacggcgccgccgggcccccagcccaggtcgtagctccgggtcccgggtgggaccctagcgctccccacgacgccctggcccccagagcgcccaccagctcctcccagcccaggggcccactctttgttcccctaacttgggtgcaccactcggctgcccccgctcctcccccaacagcgtccgtcctgctggctgcgggaaggtgccctctgcacccgcgaatgaccatctgcagaggaacggggcagcctaggtgggaaccccctgcttcctggggcagccaggtcaggttcaactcggcctggctcccgcctgccccagcagggcttaaaaatactctcagatagggaaataggggcaggagggactggcctgcagctgcagccccctttagaggacgggggcggtgctcatggccccacagccgccaaattggctcttaaggaggtcgggggctctggtcacagctgctgagcacctgctgggtgcctggaagcacctgtgctccggggcccggtggactccaccagctctctcggcctggcctccaacccgctgcacagccgcgcacgcgttcctgccacgatcggcggctcgaggacgcctggcaaacagcacaggacctagaggccgagatcaggtcttcgtctgcctttgggtggctgcggccctgggtctcctacttcccttgggctccggggccaaatctgcctccagggaagccccgagggggtggcggcggggtggggctgcagctgccgagctggcagcaaacccccatccctgagccaggccagctgggcgggccatggtcccagatgggctgtggggctcatctctcgctgggttccctggacagtcccggggggctgggtgggtttgtggggcactggccagccggttctggtgggggttctgagctagcagctgtccctggagggtgcacctccttgcacaccttcctggcgccctggcctcctgcaaatctcaaatcccaagagggtgtatggccctttctctacggagtcgggagggcgatgggaccctctctccctcctcctactttccggcccggcaattcttccataacttcactattagttctcccacctgggggaggggggagaggaggcggctccccttggcaggagaagctccaagtgggggaggggctggctggagagggggcggagacatcaaggaatctgcagtccaggcgcagagtccggctctgagctgctttagatcccgtgtgaggcagagagtggcctctgggcagtagcgggtccccaggtgggggcttggccccaggcagtgtgctctggctctgggctcccccttgacagcttggggctctgacagcctgggggactggaggtggagactcctgagaccctgagggcttcttgggatccctggagggtcgggtggttggaggggtgggattgcgagtggcggggcagggggagaggtgggggtggggagagcactttaagcctcctagcggccagatcaggccaagctgccaggcctccgctgtcccccggcactggccaggaggggagcgggggccggccctgagaatgcgctgtgtcagccggagctgccagcaccagcagggttaatcaccgggctcactgcttcccggcagacagctgccccgggagcaactggcaggcaggcgggcagcgcagtggacaagagaatgtggcccaggggctgggtaaagagcccacactctgcccccaccctgtgtctgctggtgcacggactgggaaggaggcagctggggcaggagctgagcgtatggagggcgggggggctgtcccagccgggctacacacagggggttggggaggtgagcagggagaggggcagctcatctctgcacacccccacccctgctgtctttgtcatggttccagtgagtcatcaccaaatggaccagcgagcctgtctccttgtctttctgagtcctgcgcagcccagccacctcttctatttacaaatggggaaactgaggccaaaaaggccagggtcaatcaagagcacacaagttagtaaagcaagaggaagtttgtccatcattcatttcttactcctatttactgggcatctttcgggcacccgcccgtgacgtagtcctcctccctgcaacaggtcagacggcaccccacccccaaacacgtcctgtcctgaatccacaggagggagctgcccagtctgggagtggaggggagggtaaaaggaggtggctcgccaggggagggccgtggaggagcctctgtcccaccaggctctggctgccctccagggacaatccaagatccagagcccctgcccacccagctccagggtgatggagccccagaggaggtgggtcgggggcaggggtcagtggcagcccgagagaagtaggggcactcctggccctggggaaggggtctcagatcctcccccagccctgggacaaggtctgctgcggagccctgggggcagccacctcacctgagcccccagtgctactccagtggcattcctgagaatgcccccaccctactcggccacacctgcaggcagctgtgggggaccctgagggtaggccacaggcacatctgactcagccgtgagtcgtgaactcctgaccttgggagcctcctggggacaccgctgtgctgaggacatggggcacccccacgcccacactcagctgcatcacaggcagccacaatcagtaacagatgactctgcagaccctcctgtcccagagcccagggtccaagtgggtgctgtaccctcgggagaagcccccaagaggaagcgggggctgagcaagaaggagggctggaggctgggctcctgctagggccgggcctgcgggtgaggccttgtggctcccactccagaactgggaatgttgtctcagcgggatgaggtctggaggaacgccagcgctgtggtttgggatatcggaggccacagtccctttctcagggctgctgggatgcccttccgtggagccggctggtaagaacctccatccctgtccatgaaatagagaagctgggagcgggcagcaaggctggttctgaactgttcgcgtgggccagctcagtcctctgggaggaggacacagaacagcaggtgccgggaagacaaggtctcatcaggattgcataaacccagcggactgggagagcttctgggcctcttggcctaggaggcccccactgccctcagcctggacagactgctgtaagagccagcccggagttgcagaccctggggggctggcctcaaaggaatggaggcagagcccaggaagaccctgagccatagccagacccctcccccaggcctggagcccgccttcccccagggctgccacctgcctccagcctccgagggtctgcaggttcctgctgccagaaggatggggccaagggatagtccggccttcctggcctaggcagggtctggaaacagcccgtttggaaggagtggtgctttttcctccctggctgtgaccccagctgggccactgctgggctcctgacggcctctgggacatgtggttgttggaaagcacagagaccaggctccgggttgacactaaccaggaatgaaggactctgacccaccgctgcctggcccctggcccctctgccacttgctgtgtgtgcccagctcacaggccacgcagccccaggcaccactcacggggcaggccctccacagacttggggctcttcaaagccttccaggccaggcaccatgccaggagcatggccaccgccttagggctccaggagacaagtcacccgtgcaggtgacatgcctcacgcctgcccactccccgaggcccgacccaaaggctgccactgggttcacacctggggggtttcaggtgggcccccatgccagagggggtgcagacaggcttaggtggtgcccagtgtcggagatctggagagggtcagcatccgggctccttgggctctccacagatgctccccgaggctcctcttgcccacccagctccttttcttcccaagtggcaaggagaagcgcttgggctggtgccctgtgcaggcgggcccagccccatgacaagcaggcaaacctggggtgctcagaaatgggggggcctcatggagctctgtggggtggtctgcgtggcgaccgaaagtccagagtccaggatcccacctggatgcccctgccccggcctgggcctgtgtagctgggtgtaggggagcctccaccctgccagcctttaggagggaaggagtagggggccctgggaactcccagggagggggcccgggacctccctgggatctaaccacctacaacttggcagggaaggggccggtccagtaacaaggttgctcccaggaccccaacccatcccctccctcaagtgggggcccctgtcagggcacctcccagcaccttgctggggtgtgaggcagagtccaggactcctgcccccagatctctggggagccccagaaaaggcatcgcccggggtaaacatgcagtggcacacggctgcagcgtccaccccgaggccgggcacctacgcttccacgtgtcaccttaatcttatttaattgcggtccccctaccccgtacccccattcttaccacttgcttgcctcaggcctagactggggagccctagtgagctccaggggccaggaaccccaggggaaacaggcggaatgggggcgccccagcatgctgggcagggtgactcgggaccctgagcctctacccctggggcctggcctgcctgtgccctcctcccccacaggaccacggctccagcaggccctcccctgcctctgtccttgcctggctgagctctggttctcatagagggtggggcgggtggggggtgagggttctgagcttctccaggaggtgcccacagacggccttatatggccagaaggcctcgaagcccaggaggaatctgacttcccaggagggcccagtgggcagagccagagcctgggcaggaacctgggactgcgccctgggcgaggccagggcccccacgagcccaccctcaaatgtctcccatgaacccagcctcctgggctgagaacccctcagagggaggcagcttggcccggcccctcaccgaccttgggacatctggctgggggtcccacatggatgggaacacctgcagctctgcaaaggcccctcctcaggacaaaggcctcccctcatccgggttggctttcccgcactgcaagggcaactccccaggccccacagtcagccgcttccagcctcatggacgcccacggggcttcatcccctctgcctgcgccctggtgtgtgccttggctagccagggtccctggggcagagggaagcgtccccctcccacccctccctctcctgactctctccctctgactctctgcctctctgtctccatctgtctgtctctgtttctgtctctatctctgtatctctttctctgtctgtttctgtcttcaactctctgtctctatttctctgtctctatctctttgtctatctctctgtttctccgtttctgcttgtctccatctctctctctatttctgtctctgtctctatctctttgtctatctctgtttctccgtttctgcttgtctccatctctatttctgtctctgtctctatctctttgtctatctctgtttctccgtttctgcttgtctccatctgtctcgatctctgtctctttgtctctgtttctctctgtctctgtatctctctgtctttgtgtctctctatctctctttgtctctcttgctctctttgtgttccccccgctgctgccctagccctgccaagctcagccaagggtcttagggatcacaggtgtgagcctcggtcacgttcactagggatcgcgggtgtgggcctcggtcacgttcactagggatcgcgggtgtgcgcctcggtcacgttcactagggatcgcgggtgtgcgcctcggtcacgttcactagggatcgcgggtgtgggcctcggtcacgttcactagggatcgcgggtgtgcgcctcggtcacgttcactagggatcgcgggtgtgggcctcggtcacgttcactagggatcgcgggtgtgcgcctcggtcacgttcactagggatcgcgggtgtgggcctcggtcacgttcactagggatcgcgggtgtgcgcctcggtcacgttcactagggatcgcgggtgtgcgcctcggtcacgttcactagggatcgcgggtgtgcgcctcggtcactttatttgactggatcgaacgtggggcttggcttagtctgggggctggtgccatcactgggacacaacgggccacggttcctgcccaggagctggtccagattctgcagtgaaccaggatcccaggagtgacggctcccaggccgcgcacttccacactgaaagtgccatccacaacagggatgggccctctgtccttgcgccctctgcccgggaggcatgttgctgcccccggctcacagaggacagtgcagcgtgtccttgggcgtccaggatgagatctcctgacccacatcagccccccagacaaagcacataaggcagaggcagctccgtgtgctcactgctgcgtccgagcccagcgctgggctgctggacgatggtggctgaatgaccgatcgcccctctcccgtcaccttcccactgccccgggacccacatcctcccacaccaggcgtggcaggcaagggcccagtgcccagactccagcctctttttatgcccgcctgaggcccacaccgtgatcctcactctatagccaccaacagaatcaggaaataagacaataacaactacaggcaggatcctgcggggaccagtgtggtgtccagtgtgggagctgctaggacaccagctggtggttcctcaaaggactgaacacagttgcacacggcccagcagctccacacctggtagctgcagagagaagcgtaaacacgtctctgcacagacactcgtgggtaaacacgcacggcagcgccaggcaccagagccatcaggcagaaacagcccgaacggccatccagggtcgactggggagagaaacgtggtccatccacacagtagacatcagtggacaggagcggcactctgtacaggcaggctcttggaggggctgcccagggaccagggaccggaggcctgggatgtgccatggccactggcccctcgccagtgtggagggggagagggaggagcacgtggatgctgagtgagcctgcagagccagttcaggcgggcaggtgcctgggagtcttcaggtggaggtcagtagaagcagggtacttcttggtgcttatgggccacccacacagcctgccaacaccagctggacctgtgctcatgcacagagaggtgggggcctgtgtttagggccatcacatacccaggacacccagccctacacactgactcagcctggggcgggagagacagccccgcagctgcctctgtcttcagcccggtctgccaggagcctgagttactaggcaggtccagggcctgacccccgtcccctagggtcttcattgattcaaaccgccaagcaacacctcagccacctccacctattgccagcccagtttcacgaaaggaaggctgaaaggtgggaggatggcagtgccactgaatcccctgggctggctgccccagctccggcaggaagatgccccagctgggcccccatgtgcctgtcccctgccaggagggggagggggagggggtgggccaggtgaggaggtaaccccaggatcccactgggcccccgatgtgtggaggggcaaagtgtgggtgggcccactccaggcctctgtttgccacaagttccaacattaagaaaatatttgcagctcttctggggagctatttcctgggggaatgtaaacacacggagacttggaaggctcccgctgaccacagatggtgctggggtccactgggggcccacgtttcctctcgcaagggatctggaccacccccggcagccaggtcaggggtctgtgcgtggcctcccatggggctctctctcagaacccgggagtggcagtggggatggcgtgcaagagagcagctgccacggagcctcctggcggccagggtagggcctgtcggcccagttgcccactgcctgctcctggctccacaaagggcttgctgggcagcttcaggtcagaggcgcagcccccacctccagccccctgaacatgtgggggttgtgttttcttgacctgggcccccccgtgcctccctcccacctctgtgcaggagagccaggcagcccgtgcagccgacatcaggccgggcgcggagctggctcccatctcctgcgagggacctgctcttgtttttttttgttttttgagatggagttttgctcgtcgcccaggctggagtgcagtggcgcgatctcggctcactgtaacctctgcatctcgggttcaagcgattctcctgcctcagcttcctgagtagctgggattacaggtgctcgccaccacgcccagctaatttttgtatttttagtagagacaaggtttcactatgttggccaggctggtctcgaattcctgacctcaagtgatccacaggcctcatcctctcaaagtgctgggattacaggtgtgagccaccgcctggcccccttgttatctgtattttacagatggggaggcttggttgcaggtgaagtgtggccatgtcctgccagccccccggagctggtgaatccctgccttatctgcaagtggcttctccccacacagaaaggcgaaaggcgacctccgcctgagtgttccagcaaaggccgactggctcagctccaatatgctgagctcggcagagcctggacagggctccccaggccccgcaggaggctggcgcaggccgcaggctggcctccctatctccaccaggaatgcactgagcccctgcacccctgcccacccaggtggaggaatgtggcaggggctgctgggaactcggagcctggaggagggcttttgaggcctctgcctcctggaattccccaggcctggcaccaggcggctgctccctcaggatccgcctgcctcggcctgcccccaggcggccgtgctctcagattctcctcttcccaggctgtggggacctgcagaggaaccgggccatctcaattccgctcactctgtgaaagtcccctgctcagagaggccttccctggccaccctgcccctggagccccttcatccgggccatggcccttcagagcccctcaacaggcgctggtcagacagtctggctggacactgacctgaggtggggccgcttggcccccactcccaagaggccagaagcacttgccctccagtcgtgacaaccaaaaatatcttctgagtagccccatgtcccggggctgaatctccccggtgagactcacagccctacaccctcctgggatgccagttgtcccgtcctaggctgcgagctccctgggcacagggctgtctgttccacgcaccaaggagcgcctgtacccagcacggggcttggaaatggcgggtggacatgacgggtgttctgtgctctacggttcccggcttctgatttgcaattgttcggtagaaaccgtacttccagtgcccacacaaccaatctgtttttctccttcttatagcattggacaaattacgtgaggcatttgatgcattattataaaggaggcttcgtgggggatgacttcgcccagctgtaggctaatggaagtgtgctgagtgtgtataaggcaagaaggctcagctgtgatgttccgtgggttaagtgtattagagcatttcagctgtcggtatttctaacctaccacgggtttatcaggacgtggcctcacggagggtcgaggagcacctgtgtttgtggagtgaatgaatgaaatgaatcaatactggttctcatgtagccttgtcatgcaggcctggagctcagatggttcctggctcctggtgcaggctcctggggacagcagtcaggcaggggctgccctgtgtcctggccggatggttggggagctggtgggcctggcccattccttgcccagtcttggctcagtgcctccctggctgggagcctgggagagtcttagggcttcaagtgctgagcagggacaatggtgcctccctgctgggtggccgtgaggccccctgaggggagtgggcaaaagcaccccgaggcaggggccccaggaagcgctgagaggtggtggcgctgtgggagggaggtgggggccgcggctctgcctgactcccaggccgggtgccaggttcttggcaggaaccctcctgggccctgccagttgctgggcgcctcccaccagcatggccggttgagaggtctgcatggcacgcagtggccggcccgggggtgcaaccccatcccctctctggggtccctttgcagggcagccttaggatccattcactgtggccccagggcccagggcgacctgtgaccctgcggagccacctgcaggagtcccagcagatgagggcctctggctgcccctcaggggcttgttgggtcccacaagaacttccagggcctcggagctccagccgggccacagagctgggaaccttgagtggctgggaaccctgaggagctgggagagccaggctgagcaagacaagcctgggcgactcacctggggcaggaatgtggattccatcactccgcagaggctttcaagcaaaacacagcctcgtctctgggcctgtttctgccgtgcgggcacgtccagcccgacgctctcagaagcagctgggatgggctcggggaggtgggggtggagcaggagtcccagccgccttcctctggggcccatcccaggctcccggctgggcgccagcagggctccagaaatgagggggcctcacaccgttgcctctggacgtgccgtgcccgaaatcccgccattcccactgggcatgccgggccctcgaatcctccatgactccagggaagcgactccgtcccgcttggcctcagtcactgctctgtcaatgggatgataactgcccttcccgcaggctgccatggggtctctgcgtggccccagcaggtgccaggctgctggtcaggacccctcgtgggcctcccaggaggtggctcctctcaggtcacagttcacaggtggaaggatggagcctgctgatgatggctctccaggccctgctgtcctgccctggcactggggaacttgttccatggagccctgcatccggccggccactcccttcccatgcctgcttgctggcttagacattctgcacatttcccagagggcaggaggagctaggccccgagagccagtcccaggccccttcctggacacataggcagacagaggtggctaattttctttttcttttcttttctttttttttttttgagacgagtctcactctgtcgcccaggctggagtgcagtggtgcgatctccactcactgcaagctccgcctcctgggttcccaccattctcctgcctcagcctcccgagtagctgggactacaggcgctcaccaccacgcccggctaattttttgtatttttagtagagacggggtttcacaatgttagccaggatgctcttgatctcctgacctcgtgatccgcccccgtcagcctcccaaagtgctgggactacaggcgtgagccaccgcgcccggctaattttttgtatttttagtagagacggggtttcaccgtgttagccaggatggtctcgatctcctgacctcatgatctgcccccgttggcctcccaaagtgctgggatgacaggcgtgagctaccgcgcccagccagaggtggcccattttcagtaggaaaacagcagcaaaagtaaaagttagtttttctctgtgtctgcaggtgcaccccgtgtggacgcgacactgcctttgcatagtgcacccctcacggtgtccctggcagtccctttccctgtggatcctcccctccacccacggtgaaggaggaacggtcctgcctccaaatgggaaaactgaggctcagggaggagaagggccgggtgtgtgtggaggtggcaccagaaacaggcctgattcccaggtctctgccttaattacggtgctgccctggctccggaatgctggggcctggggtcagaagttggcctggaggccgggtgcggtggctcacgcctgtaatcccagcactttgggaggccgaggtgggcggaccacctgaggtcgggagttcgagaccagcctgaccaacatggagaaaccccatctctactaaaaaaaaaaaaaatacaaaattagccaggcgtggtggcacatgcctgtaatcccagctactagggaggctgaggcagaagaatcgcttgaacccgggaggcggaggttgcggtgagccaagatcgcgccattgctctccagcctgggcaacaagagcaaaactccagctaaaaaaaaaaaaaaaaaaaaattggctaggcatggtggcgggtgcctgtagtcccagctactcgagaggctgagacaggagaatgatgtgaaccagggaggtggagcttgcagtgagccgagatcacgccactgcactccagcctgggggacagagcgagacttcgtcttaaaaaaaaaaaagccgggtgtggtggcttatgcgtggtggctcatgcctgtgatcctggcactttgggaggccgaggcgggcggatcacgaggtcaggagatcgagaccatcctggctaacatggtgaaactctgtcactactaaaaatacaaaaaattagctgggcgtggtggcgggcacctgtagtcccaggtacttgggaggctgaggcaggagaatgacgtgaaccagggaggcggagcttgcagtgagctgagatcgtgccactgcactccagcctgggggacagagcgagactctgtctcaaaaaaaaaagaagttggcctggagccgagactggggatccgtctatgctggggtcagaggtcagcttgggcccaggtcaggatacaggcccacaggtcccgggtggggacagaccccagtctctgccccaggtgggcctggtcctggaggcagagtgggccttgcttctggtctccccttcagcttcctttctttgaaccagtttggctgagctggcctggcgcctggccagcgtgggagcccttggtgtgtccactgggatggaagtgcctcttttcctgtcatttggctcagatttcagccagcccccaggaggtgtggggagaggacttctccgggtctccctgctgggtcagcctgtactccagggagactcacggtgggacccagtacccagtgcccaggcccggccagcccagcccctctgcctgtcttcaccatgtcctggaaaggggcatgaggagcctctggggaggggggtggggaaggtaccctggacccccaggctctgacccagtgcctgccgtgaccacaggggtgggaccttcaggatctgggcactttctcataggtaggttctccctcaatgtaaaaattctaaagtctcatcaagtaaaataaattcaaaaaacaaaatagtaaagtgagttaaagtaaaactgaatggcacgaaatggaaagatgcgctggcccaacactcccagggtccctgtgacaaatgccgtgacagtctccagggctcccgggcagctgggcctccccctcacgttggtgacctcacttaagcctctgcaaacctggggcggggctgttactgcctctgtctctccaagacgagaggatgtcgagtcatggcttaggaggcagtgccccaggaatcccctgacagctcatggccaggtccgtgttctccccacaccccataagtcccactctgaggctggctatcgtagccttcacccaagagcgggttctatctggggcaggagtgggggctggtggctgtagctcagtgtcgggctcgctgcaggagaaggcccatcccacggccctgacctgccactcacccggacacccacctccctggcctggaaggaggatttccttgttctgggcttgttcccttctacacacaatgcatttggggctggcctgggccctgcttggcccagaaacagctgctctgggaaggaggagggaggctcttctcccagcccgcaccacagcatgtctgagaacatgtttacctgcctgtgaggtgagcctgaaggaggggctggagagcagagccagggctgttgtgcacagatacctgcccaggcatcctgaataggggcccgtgtgagattggggtggctatagtgtggcctcctgagtcaacagccccaaatccagacctagtcttgtgatcttgggcataataacgatgacaatgatggtggtgacgatggtggttatgatgatgatggtgacaatgacaatgttgataatggtgatgatggtgatgatggtgacagtgtgttggtggtgatggtggttgtgatggtgacgatgatggtggatatgacggtgatagtgaagatgatggtgaagatgatgatgatggtgatgacaatggtggtgacgatgatactgacagtgatgatggtgatagacaatcatgacaataatgatagtgatgatgatggtggtgatgatagtggtgatggtgatgatggtggtggtgatgatagtgatagtgatggcgatggtggtgatggtgacaatgatggtagtagcaatgatgatggtgatgatggtgagtgttagtatgctgggtgccacacctttttctgagcactggacaggcattggtttgttgaaagcagccaactgcagcacggctgggtggctccatgacagtcgctttactttacagctagagggagaagcagctaaggaatttgtgccaggtcacactgctaaagaggcacaaacctggggtgacactggcagtcaaagttatatatagcaattgcggggcagaagcaggtgtgagtgtgctctcaggtggatgcaggggcactcagagaccctgactgggatcaccctgcaaaggcagcaactgctctgagccgctgggggctgctctaggattctgcaaaaaaggctcaggccgacggtgtcttcgagtgctaggtcctcctgcctcctcaatccctccttcacacctgccctctggccctttcccacgagacccactggaggcccagtaaacaacttactgtacagacagcgggtggagggatggaggggaggggctcagctcccttcagccagccccgtccctgctccagcactgctctcagacaccacctagtggcttctggggacagtgctggtggccccaagcctcctgacaggtaagcagtgccacctcctctgcaggcccctggaggctctcctgatggagcgacccagacggcttccctcgggaggacactcccctctctgttttgggggtctgcgattttgtacagaaggttttcttaaagaagtgctcatccagatttcgtgggctcaggagatttaggttgcagaggtttcccttgaagaactcagccttggagacccggcgcccagagagcggacttcaagctttgtgtgagtgagtgcgtcctagagtcttgccaaatagcacctatagtctctgtaaaatttttgagctataattgatgcaaaataaaatccactttttaaaggatacaatttgacgttttgacttttttttttaagacagagtcttgctctgtcgcccaggctggagtgcagtggcgtgatctgagctcactgcaaacctccgcctcccaggttcacgccattctcctgcctcagcctcctgagtagctgggactacaggagcccgccaccatgcccggctaattttttgtatttttagtagagacggggtttcaccatgttagccaggatgatctcgatctcctgaccttgtgatccacctgccttggcctcccaaagtgctgggattacaggcatgagccaccgcacctggccaatgttttgacttttatatgcaactgtgaaaccattgccatcatcaagacagcatatacctcccatcactccccgcgtttcctgtgtgtgtctgtaatcccatcatcaagacagcatatacctcccatcactccctgcgtttcctgtgtgcgtctgtaatcccacttgctcaccaccccaccccaggcaaccaccaacatgattcctgtcagttttgattggtttgcattttctagagtttatacaaataaaatcacacagtatgctgtctttcgagggggacgtaccattatttatccatctgcctgttggtgtatgtgtggattgtttccatttttggctatgacacataaagcctcgatgaacatttcagtaccagtctccgaatggacatatgttttctttcctttttttttttttttttgagacggagtctcgctctgtcgcccgggctagagtgcagtggcgagatctcggctcactgcaacctctgcccaacgggttcaagtgattctcctgcctcagcctctccagtagctgggattacaggcgtgcaccatcaggcccagctaatttttgtatttttagtacagacagggttttgccatgttggccaggttggtctccaactcctgacctcaggtgacccacccgccttggcttcccaaagtgctgggattacaggagtgagccactgcacccagcctggatacaggtcttttatcagatacaggttttgaaaatattttctgccagtctgtggctttctttctttccttcctttctctctctttttttttctgggtctcctgtcacccaggctggagttctgtggcatgatcatggctcattgtagcctccacctcctggctcaactgatcctcccacctcggcctcctgagcatctgagactacagacacacaccactacatccggccaatttttaaatttttttgtagaggggtttcaccatgttgcccaggctggctggcctcagactcctgaggtcaagcaattgcctgcctcagcctcccacagtgctagggttacaggcatgagccatcactcctggcctctaatctgctttttttgatgtgtctttgtctgatttgggtatcaggataataccggcctcataaaatgattggaagcattccctcctcctctattttttggaatagtttcagtaggattggtattagttctttaaaaaatgtttggtaggccaggtgtagtggctcacgcctgtaatcccagcactttgggaggccaaggcgggcagatcacgaggtcaggagttaaagaccagcctggccaacatggtgaaaccccatctctactaaaaatacaaaaattagccaggcgtggtagcagacccctgtaatcccagctactctggaggctgaggcaggagaatcgcttgaacctgggaggtggaggttgcagtgagccaagaccgcaccactgcactccagcctgggagacagagcaagactccgtctcaaacaaacaaacaaacaaacaaacaaacaaacaaaaactaagaatagagctgccataaataaagcaatcccactgctgggcatatacccaaaagaaaggaaatcagtatatgaaagagatacctggccgggtgtggtggctcatgcctgtagtcccagctactgaggaggctgaggcaggagaatcacttgaactctgggggcagaagttgcagtgagccgagatcgcaccactgcactccagcctgggtgacagagcgagactttgtctcaaaaaaaaaagaaagaaaggaagagatacatgtgctacgatgtttatcacagcactattatttgtgggagctaaaaattaaaacaattgaatttgtggagacagacagtagaaagatggttaccagaggctgggaagggtagaacagtgggaggaggggggcaaatggggatggttaatgggtataaaaagacagaaagaataagacctagtgtttgatagcacaacagggtgtctacagtcaataatgatttaattgcacattttaaaatgactaaaagagtatagtattggattatttgtaacgcaaaggataaatgcttgaggtgatggatgctccatataccccatgtgattactacgcactgcatgccggtatgaaaatatctcatgtgccccataaatgtacacacccactatgtacccaaaaaattaaacataaaaaaactttttttttttgagacgcagtcttgctctgtcgcccaggctggagtgcagtggcgggatctcagctcactacaagctccgcctcccgggttcacgccattctcctgcctcagccttccgagtagctgggactacaggcgcctgccaccacgcccagctaattttttgtatttttagtagagatggggtttcaccatgttggccagacgggtctcgaactcctgacctcaggtgatccacccacctccgcccaaagcgctgggattacaggcctgagccaccgcacctggccactgagtcttaagttttctgaggctagttctacatcctaggatcatgtcccccgcccagagaagaccccaacataggccgcgctgctccctccgtctaccggtttggagcttctcctggcaacagggttcaggctactaacaaggccttcctcaagaccccacccataaccaacgaccatacttcgtgggtccatctttgtaacatctttacttccttggagcaaattcccaggaatgggttttcggggtccaagggtatgcacctctagcactacgacaaacgcggccaacacgcttcagggaaacggtgccccagtttgcattctgcttcccctgccctgccctgggggtctgactggtgaaacatgggatggcagagtggtcgggtgtttcagattccacggtgggccggggtcttttcctaccctcgggagccgtctgaatttctcctctgccgagttcctgcgggtgtccttcgcccaccggcccgggggagtgagtagcaggcaccaggtgagcaggcctccgctcgcagcggctacgtgcacgggcaggagcaccgccccacgccccaggtggccgcagggtgaggggaccggagggcgggaggcgcacaatggggggcacgcccgtatctctagcccggccggcagcgggcagcgaggctcagtcctcgccccttctcccagctgctattcggggctcccgaggcgctcagaggggtcgactgcgtccgtggggcacaacccaggggccaggctaagacgccacacacggcaacgaccctcaacgacaacgacccccacgacgccccgcgccccagggccagcaggctggggtccgagaacctccttgccggaagcggaagtgcgtcacggcgacggccggcaagcacgcaccgcgcagactcgctgtggtggcgtgacccggaagcgctcgccgaggcccctccttgcccgccgatatctctgccgggtgactagctgcttcctttctctctcgcgcgcggtgtggtggcagcaggtgtggcgcgcggcgcgggcttcgggctcagggctggggctggggcgggagtgggggcttggacgcgggggacggggtgcggggtgctgggtgcggctggggccgtgaccctaggggccggtttgcgccgggagccggggcacggttccggccgtactcacggcgccgcgcggtgactccccaggcgcagcccagcctcgaaatgcagaacgacgccggcgagttcgtggacctgtacgtgccgcggaaatggtaagcgccccccacatgcctctcttccgtccttacctaaccaccacgtcccctcgcctgcccttgttcccccacacccctcccgtccttacctcgtcacgtccctaacttgtcctgcccccgacgttactcttttccattcatatacccccaacctccctcgtcccctctttcattcttaccgcccaagtcccctctgctcactgcgccctttctccacagctccgctagcaatcgcatcatcggtgccaaggaccacgcatccatccagatgaacgtggccgaggtgagctgggagcccgggaggcgggaaggttgtgatatatgtgcgggaaaggcaggctgtcccattgtggaggagcccctggggtgaaggtacaggcagaggctggctttgaggattggtgtttcccaaacctgggggagtggtttgtgacccttcttctctttctaggttgacaaggtcacaggcaggtttaatggccagtttaaaacttatgctatctgcggggccattcgtaggatggtgagtgtttccctgggctttgctcatcacttcgggacatcgtggactttaccgtgcgcattggagtgtgtgatggtgcctgagtagatctgctggcagagtagtttgagccagctggactgggctggccgcctgccgcttcttgagggtggaagaggggtgctctgagaagacactcaggcagcagactctgcctctcactaggaggtgcccccccgaccccgctccaccatagtcaggctgcaggctgccccgggagaggtggctccccttctgcgcctgtctccattcgctcagcgggggagagacgtgggctggtggcacagctgaccttctgccatctcaggcagccggagtggaaatattcttagtgtgcttttttttttttcttaagggtgagtcagatgattccattctccgattggccaaggccgatggcatcgtctcaaagtaaggttgggggctcacatttgggcagagtgagtggactaggactgctccagaggcgtggtcttaacgttgtccttttcccctggttctaggaacttttgactggagagaatcacagatgtggaatatttgtcataaataaataatgaaaacctacctgtgcaggttcattctgtgtctgtaggcccagggttgaggttttgctgtcagtgggtgacgggtggggtagggtacccagttagttgaaaggagacaagctgtgaaacatattgcaaaactgaggtttaaaggacaaatacattatccatttaaaaacagatatctaagacaaaataactcaaacattctgaggtctgatacttgcttatgcacactgacatccacaactgctaccggtgcggaagcaacgccaggcctggttctgtatagtcacagccgagctgaacaccttagctccgacacctggatgtgttctagagaatgacaggctgagactgtagtttggtttaactactggctttgttgcaataatcctcgaataccacacagtggcagcttttggcatcataaaaatgggacataactgaagggaaggcttcacacatcacaaagaccgggttggttaatgactaaatctcactacatgaatacgcaatcttaaattactgtgcttatcagccatttctcgcattcatgtgtaggaaaaaccatggagacgtgtccctggagggcaggttgtaaactgcaacagttactaggaagtcagtcctttacatgctcgtaacatgggcgagctcttgagatgggatctgggtggcaggagaggttgcttttcagaggaaagctgcctgggacccagcatggtggagcagctttgaagctgagtcccctctgggtgcatactgggttccaggggatgatccttggcttgagggcaggctgcttgatggaaggggacgctccacaataagaaagaacaaaggctttggtttgtcctcatcctccagtctgtcccacacacctgccatctctgggttttggtggccccagtgagtggctgtggaaaaggaggagggccaggtgggtgctggcagctgtcctgcaccactgctggggtcgggtggagttgctggtggagttctgtgatagcagaattggcatctcctttctgcggaagcaccagtctgcacagaaagcataggatgtattgtattaatgggctagagacaaagtcgtcccagagcccctccagggccaggcaggtttataaggtagtggtaggaaaaagcttggtggctgaggcagtggccagttttgagaccagctgaccccccatgaagaaaaactcagcagtccttggttattcagtgtttttgatgaggcagctagctggagcgctggaccatgcagaatttgttgcaagaacttcagacagacgtggaaaaactagagatggggccctgctggcctgcacagaagggacaacgaccaccatttggggtccttttagcatggtgggctgccctggccgaggtggccaagatggcacctgtttcctgcctcagaagaaaaggcactgacgcactgaccctttgaggttgtgtggggtgtggtcagtgccctcctgcctgagggtcaagtgtgttttcaagtcaacttcagcagacctcatttaaccattttttgttcccttaaaaaaaaaagacccaaaaaaccaaatcccaataaatatgttatttttctccatcacaatattgcttagaaaaataagagccggcaagcagcaattgtcctggaggcccagagtgtctcctggtgagaggcagagggtagagcatggcatgggatgggcagctgtctgttgtgccgtcggtctgtaggacacaggggcgttaggatttcacagtgacacgatgcttgaagaacagagaggtccaagagtccaagaatgagatcaaaataaatcaggagactgctcccgctggcctaactggacaccaaaagctccacttgggatgcagtgaggtgggcggagaaagctctggaggagctcggcttcaggtggcagggagccagcggcacagttggtgtcgggagatgctgctggggaacccgaaaaaccacatctccaagatgaatgcctaaataagttaaactcagccattccagtgtgttcagtgaggtctagaaacccagatctccaccctgacgctgtggtggctgcggtggtttgcagaaggcgaggccaggggagacacactgcagccggctcgctgctgcacgctgtgaacaaaaggtcctggtaccaggctggtctcaggcacgtgaaaaaaataccagtaacaaacctcacatttagtttatgtaaaaatgcaggagaattctcagaaatcccctcggagggacggtgcacttggggatgaaagcgacgtctctttccaaggaaatggcaaagaggcaaaaaggaaagctgcaccagcggaggccaggtgcctcctgctagcaggtgctgggggtgctggcaggaggaggcgcggggcttcagtgggacacctcccaggccggcaagtgcacctcggtgccctgagccttctgtggggcctctgctagaactgctgggtgaggcgcctgtaatgaggtaacacttggttctcgggaagatacagggccagctccaaggccacgagcactgtgaactcaaaccctatcaggtcgcgcctgttgaatcgaaacctttcttctaacttctgcaggggagaagagagaagggttacacgggagccttccctcttccacatttcccacccggccagccccatcccagcagtggccctggctcgatgtcatgaccctgcctgcagtgcctgccgagccgggcactcacatcgatgagctgcgtcacgccgctcttgcgcaggtcactgctgatcttggcagccagcagcacgcaggcgccagcgcacagcttgcggttctgtttgctgagcttgccctgcaggaccagcttctcaaagtacacgtaggccatggccaccgtcacgggctccaggctgcactcctccgacaggctccgcatctcccgctttaagctgtgggttaagacagaagccatgtccctgggggctctggctggggctgaggaggcagccccctgccaccaccaaccgaggctggagcgatgtagctttgggccgcaagaaacaccaccgcatccttcaggggatggtaccctccgccgtaccatgtataacgcccagggcagggcgcatgggcagggaccggcaggctgggttttggcttcccccgtcccgtgggtgggcacccatggcagctcccacctgtgcctggtgggtggagccacagaggacaggctctgctctcggtggggggcagtggtctctgatgaggggtggttttaggaagagccttgaagggaggtgccagggtattgagtgagctgccctctggaacactggggcagaggccggcagggcaggcccccagtacagggccgtggccaggagcccgacgtgagcccagcagttccgccgccttctgctcgctttcctccggtcatgggtcatcagcgtggcacaatgtgagagcagaggcacacctggacggccttggcgagcacccagcatgcctggatgggggcgctttgtgggccaggggaagggccacggaatctactcacaaaatagcacacactgggaggggccgggcacaacagaggccttgtcccactcaagttttaaaaagatcctgggctgctgcgagggtctggctgtgagagacccagtggtgtgtggggggatgcagtgtgatggggccacggggggcctggcttggcgggcggtggaggtgggggagctgctgctgggggcctggtcggatggcgagagggggttggggatgggcagcggctagacttgtcaagctggagagaatctaccagaaactggagaggagaggctggcagggcctcccaggacgatgagatggtctgagagggtgtcctcacctcctgattttgctcagcgtcagtttgacatgggggaacttctccctgaaggtctcgttcatgtcctttttgaggtctgagggcttcacgtattctatcactgtggtctgcaacagagagtgggcagggttgggccggcccctcgcacagtccatgggtcctgcctgctgggtacgatggatttctcactgtcctgggtttgcaaacatgcatacggtgtggcttgagaggccccgaatctctgagaacaaaatggctcaagagagagaactccagagcccatgcctgcttggtgtggggagagccaggttgccaggtgccgagggcggaagggcaagggtggaccccagctggagtggccagcactgctccctggcctgccctgcacaccgccactgtctgtgctgctgcgatccgggatgggggcacgtcacgcccctggggcagctttgcccacagcctgccccacacgccccgagccaggacaggtgtgcagctgcctgcacccaggccctgggagagggcactcaccatgtacgacgcaaagatgaggacacgtttgtgcttgccgcagggccactgcgggtcatccaggaggttggggttgtactccagggtgtcccccacgtcactccctgtaagagaggcaacccctgacccaccaggagtcttgagcagtacccatctagccccaaggcctggcaggccagcgccatggcggggcaaggccgagcaggggaggggctctaggccatggttctctcctgaagggcccagggcttagggcaagaaaaggatgtcctgagaggaggggccctccctggagtcatctgtgggtggatgcagctcctccccactgcctggctcaggccaagcccagggatagcgattcagtgtggagctgttcctctcctgaccctgttccccaggctccatctgcacggagggctacagattgaaaggggcttgctgatgctgctgcagtccctgggccgtggttaaggcacgcgggtcaccctgttccaggccgtggttaaggcacgtgggctacctagttctgtgctggctggtgccgacttggtgggggcaggtttatgtcttgaccctggcagagtccgggggacactgggccgaggtgtgggcagcaggccatggctgtcactcttgtgtgtgaccagggcgttggtgggatacaggaacttcgcataagacacgacctggaaaagcaaatgcatctggcctcagctctgcctcccgggaccagagggcaaagtgagctcccgctgcaggaagcccagacgcacatgccaggagccctgcatggaaaatgaagggaacaactcagatcaagccgttgaggctgcgtctgagctagacgctgctcctcacatagctagaacattccggaacactactgtgctttatctgggttctgtagcctgtaacgttctccctgcctctgaagactgctgaccaccagcacagaggccagagggttggcgagccccaccctgcagcaggggggtgtccaggagcacctggctgtggggcagtggcgcagacctcaggcacggccaggcgggggagtccgacgggctccagggccacgttctcagggctgcacgggcccgcatccactccacccttgcgttttacgtggagtgaagcacagcttcacgtgtgcctcgtgggcactgacgtgggactgctcccacccgcctgcctggccctgacggcgctgggtgtccaccagcgaagaggctcttaccttcccgtctgctcctagctccacaccttctagctcaaagaccatctcggaagacacagagacgccgccggacgggtgcctctgcttctggctgtccaccctcaggtcactgcaaacatgggagaggcaaggggctgtggtctgcgctgaactcaggctctggcagcccagcccacctgtccgctggcccgaggtgctctcgggaacaatgtcagcacagcccctcgggaaagaaaggcggcactggtgtgaccaggaaggcgcacgtcaggagtgctttcatggaaggaggggtttttgagccccgcttccccagtacagacactggctggtagagcccccggggtggcgcccaccttcactagcccactaggtacatgtgcccacgcctggtcaggtttctccaccactgtttttaagccagggccacacataatccccaccccatagctgtttcctccttccctgaattacgcacggatacgactgcctggatggtcacagcaccaagtggctctgtccacaggaggtgggacagcccagccacctgtacatcgacagcgtgaacagaaaccggctcctctggagagtgaggacccgaaacggccccgggttcctgaggagctttgctggaggttgacatgctgagcctcgcatgagcccgggggcagccgcacctgggggcgcagtgcccgctgatgcctcctgggcctggccgagaccaggccttgccttctgcctagatggacaccgcatgcgaggcaagcgctgagtactcacctgatccgcaggccttccccatagggcaggaccgagaaggccgcgcacagggaccgcttggcacagatgagcacgatcctgcagggggacggagtcaggggagacggggccggggagcggggctcaaggtactgctgcttccagagctacagacatttccatggaaaattccttctgcctaaattcaggtgctgggaaactgcccatgctgtccaaggggacttgagcccaggaggccgggtggccaccgtcactaagcctggcccccgcaagctctcagagtggattccctacaggagctaccggggttcccctccctgggacgccgctgcacgtgggcaggcacagcagtgacatcccgaaggctccttcctgacccagtgcgggtagggctggcggcctcacctcaggatcttggctcattcagagatgagaggcagccagaggggacaggatggcgaggccaagggctgcctcgagccagacctcagaggtcctgggtggagcggggctcaacaccaccagaaagggcctgatccaggtccacagagaggctggcctggaggctcccttccaaggcgctcgagcagccgggccccgggcccagagagcacaggcagaagccactgtttctcctcccttggacgctggctctgccctgcctgggcccagggtctcaccagggggacaacagtgggagaacttctccccctctctggcttggatgacgggagccagggctggcactcacgtctgctgggagctgtacaggactgatggggagcaagggtccatccagacccacagtcaccacaaggagggtgcccggcagggggagctccagaaggaagggagcactctggacctcaggacacctcaggacatgcagtgatgggaatacggggccacaggaacagcccctgcggcctccccgacacagcctctcagggtgcagccggtgccagctgcggccctccgccagctttgggcagccaggtgtttggtttattcagcctctcctccgtgctcccaacaaagcccagccctcctccccacacatctcacagccacacccgtttctgtgtctccagttttccttcacgtcagcactgttgctggaggctagtgtccacgtgtgacccttcacctgggagcccagagagggtgatctcgctgtggtgacaccagggacctgcgggtgctcggctgatgtggagcaagcagtgtggtggggaggagggcccacctctagaggtgtggagtgtggggtgggcgggagctttgggagtggagggaagattgcttggctgacaggggcaggaccccgtgggcttatggagaccacagccctggcccggttcccggctccgcttcatacctgctgttcctggtgtcgtactgcctcatgttcttgatgaagtgggtcttcttcaggcctttatgtctcggtgatccagatgtgtgtttggttctgcaaggcaaaggacacaggtcactcttttcctcccaggaccctctggccccgcaggggtcagtggcagcccgagcggagtcgtagagctcggggcggacgggggcgtgtacctctgtgctggagcgcatcccacggcatcttccagaaactccagggagcagcgctgggacgtgactcgcttcctgcaagatgacaatggagcctcaaaacaggccaccagcccgggtgccgcctttgtggccagaaaccgagtgccgcccgctgtgcagggaagggccactctccagcccagcggcgcacccatgggccgaggggcttccagagcccatgcagactgaggcggggaggaggggcacctcctgccttgagaggttcctgttttggaggcactgagctcttctctggggaccagcagccctgggggacaggctcctcaggcataggatagcacagcacagcacagcacgccaacctgccctgcccaccgagggtcgctcggccccaagcaacaccctgctgggggcaccaccaactctgacaggcccatcccacccagcgctgcctgagactggtgctgcctgcccctccctgaagcacagctgggcattggggcaccatggcatgggcaggcggggtgggcaccgggcaccccttgctctcaggccaccttcccctggcttgcagctccctgcaccagccacaacctcccacctcagtgccgtcacgggggctgctcctccgtctggaacattctgttcctgctcttccagtggccacctctttctgaactttttggctcataggtggcccgctgagggaggctgcccggatcctgctattctgtgacttgctcaaggcactggtcactacaggaaggaggcatccctgcctcaccacccacctgccgtctgcctccccttccagagtgccggccccatggatggggcagggtctgtccccactcactgctgtccttagtgcctgccctcctgcctggacttcaggagtctcccaggtgtttcccataagcgaaacgtgcaggcaaatatttgttggctgaatgactgtacaacgcacttccttgaagacccctcagggcacaatgcccactgctcctcagaccctcaacactcgggaccaagcgaggccatcctgatgcggagacatgacgtggttcagtaactctcagggtcacgcaactccaagtgcagagctgggtcttgaacccaggtctgtcggggactccaaagctttgttctctcccttataccgggagccatgaatgtgtgcctgagcaccaaggcattccaaaagcacagcttaggagataaggtcccatgccagttgatacaacgttgcagtattggaaaaccactccaattgcgatgacaatgatgggcgatgtggcgtggcacgtctgaggatcctgcctgccctgcagggctgttggcccccagaagggagcagttggtggtggtgatggcggtggtggtgatggtgatggcagtggtgatggtggtggtggtgatggtggtgacggtagtggtggtgatggtggtgacagtggtgatggcggtggtggtgatgatggtgatggttatggcggtggtggtggtggtgacagtgatggtgatggtggtgatggcgatggtggtggtgacggtggtggtggtggtgacggtggtggtggtggtgatggtggtggtggtggtggttatgacggtggtgatggtggtggtggtggtgacggtgatggtggtaatggtggtggtggtgatggtgatgatggtggtgatggtgatgtgatggtggtggtggtgacggtggtgatgatggtgatggtggtggtgatggtgatggcggtggtggtggtggtgatggtggcgatggtgatgacggtggtgatggcagtggtggtgacgatggtggtgatggtgatgacggtggtgatggcggtggtggtaatggtgatggggccctctgcagggtgctgtgtggtttattaaatggagcaacttggcccccaggcttggcatggggcattctcagcgtgtcaacagtagcctttttattaagtgtcacccaatctggactccgggccaagggcaggtgtactgctgggggtcacttctgggaactctccaggctccaggccagcgccgtcctcagggtcccatgggccttcccccagcaggaccccggcttacacacaagacctggtgcactcaggccccctctctggtggagccggcctggagtccaggtccccacaccatgcccttgccaggagcctcccactgaaagccagtgtttgtcccaaggcgctgggttgggcacagccacagtcccatggtgggtgccacctgtgccagcgagagtgccacagccaccacctcaccaacactcgacggctcacagtgacaaccacacccatttatcaagtggtacggagaggcctggcccttgcccaggtcacacagccagtgtagtcctggttggtaccaaggctgtcaccttgacgccaacattgatgctgtcatttttttctttttttgagatggagtctctctctgtcacccaggctgaagtgcaatggcgccatcttggctcactgcaacctccgcctgctggattcaagcaatcctctctcctcagcctcctaagtagctggaattgcaggtgcctgcctccatgcccgacaattttttttgtattttttagtagagatggggtttcaccatattggccagtctggtctcaaactcctgaccttaaatgatccgctggcctcggcctcccaaagggctgggattacaggcgtgagccaccatattttattttatttatttttttgagatggagtctcactctgttgcccaggctggagtggagggggcgccatcttggctcattgcaagctccacctcccagcttcaagtgattttcctgcctcagcctcctgagtagctgggactacaggcgcccgccaccacgctcagctaatttttttgtatttttagtagagacggggtttcaccctgttagccaggatggtcttgatctcctgacctcgtgatccacctgcctcggcctcccaaagtgctgggattacaggcgtgagccaccacgcccggcctgtttttttttttgaacagatgctcgactgatgatggggtcaggtccttttttttttttttttttgagacagagtctcactctgtggcccagtctagagtgcagtggcacaatcttggctcagtgcaacctccacctcccaggttcaagcaattctcctacctcagcctcccgagtagctgagagtacaggcgcctgtcaccatgcctggctagtttttgtatttttggtagagatggggtttcaccatgttggccaggctggtctcgaactcctgatctcaaatgatccgctggcctcggcctcccaaagtgtcaggattacaggcgtgagccaccatattgtataacgaagtgtgaaatagctcctgtaatttgttggatactgtactgaaagtgaaaaagaacatggttgtaggggtaccaagtacagtttgaagtcaggaacttaagatgtgattaaaatcttttaaaaggcaaagtcaacaagagcttgttgaaaacaagctaggattgaaagcagaaaatccactaaaacgcctggtgcctcacattggcgccatcaccagacacagctgtgcacctgcccagtcccagctggaggtgggggcaggggaccagccggatggctgcagaaggtgggtgagcagctggccagaggagagcacttggatgatgggaccaggaagggctggggatgcggtgggctggcctgcacagtggggtgggtggggaaggaggagctaaggggctggggtaggcagcaggctctgagggcagtgggaggggcagagcacccagctgcatgctgagggggtgtgtggcagacgccggctgtcccgagaggcccaggtgagtgctggcctgtgatgggtgacggcggacagactgccccaagaggagcccagcggaggctggatgggcagggcccacactggggaaagaagccagtgaaggaggagatttggggactgtccccagagaggtgtttgtgtgtcctgacctacaaggctgggcctggaggccctgaggaccagcctgtgtgtctttctggaagctccttcccacgggtaattaccaggggatgcctgggtatttgcatgcctgggacttcatttggaggcccgtgggggtcccagcagaagcctgaggccccgcggcagcctgcctggtggtaccgttggatcctctggcccaggacgcagaggagctgcagcagggaggctgacgctgctgccggctggcctggctcctccgtgattttctggtcgctgcaggaatgatgggtttctctccactatgctttaaaatctgttcccagcaggttcttctacagatctttctctgtaatttccttctcttttctttttttgtaagcatcttattagtaaactagatctgcacagttctaggaaggaggcagcattctgacgctcagttcatgggtgggtaaattgaggcaaggagctgtttagcaacttgcccaagatgacatggctggtaagagacagagtggggacctgagcccacgtggacggccgggctctggcacccagtggcgccgctcccactgtgtcagttggaatggtggccgctctccactgtctctcaggggctcattttgtgaacctggccccgttgcaggtcacgttttttggtttgagtccacaagactctgacaatgctgaaggaggtgcctgcacatgggtgcagggcagggcggccaagtggggaggacgccgctttggccttcccttcccctctgcctccacgggagctggtgtcaagggagaacgagggaggtgcttcccttccagaaccagggctgttgcaactccacgcatcaccgcagcagggcgctgctgctgacgggacgggcactggcaagtgcagatgggacccaggccagcgtccattgcttggtgcctctggaggatgggctgggaacccatgagatggacccctgctcgccccgggccccacagagaggtgtcggtgtgtccggcagacatggagaggatcacgcatgtgcagatgtaccaccttacgcctagctggaagcagcacacacgccggtcagcaggaggcgggacatgcgcaatcaggggacggcatgcacagcatgctgcaggtgcacacagacgccacacgggttgagaggctcgtcatgtggtgacacaggtcccctcagtgtgggggaggggctgaggaggggcaccagggagctgggggattggcctgtgtctccgcaggggagtggctccgtggggtgtgcccaggcaaatgcactgagctgcacgcaccttccatgtgcttcactcatcctgcgtgcaccagacccctccgtccaaaacatgcaaggaacaagcgagcaaagcagaaagaacgaggccctcggcaaggcccacgccccacaccccacatgctggggcaaatgcaagttctgctgagtcccaggaggccccgctcctgctcagccaccgtagagttacactggcggtgcctactcgtggttccccccacgtggcagtgaccagctcaaagctgcctgcatctgacttgggaagaaggggttgggggttggggcagtggggagtctgcccccccagtctgctgacacacctcactcactctcagcactaaatggcgggccaccaagcctccatccaaagtcatgctcacagacaggaagagaaatctgctatttattaaacactgtttctagtgttcggtacatttcctttcctttgtaacggaagaaatgcccagaaggggctgaggcctgaagaccccatccccattagaaacccaaagctgtgtgtacgagctgctctgaggctcagagggaactcaggaggcccggccgggcaaaggggccgttgaaatgaccttgacggtgggtctgacaatgtgagaacagccgggagcctctgccgaatgactgcgcttctgtcccacggcgtgcccacgccagcaccggggagactggaaccgtctctcgccaggaaggcgtgggcagtggtgttgttcggctgcccccagctccaagtgtgggcagtggttttgtccgaccacccccagccccatcccctggaccctggggcacagctgtggaatgcgtggctggtctcgggtgccccatctcatcaagtcccaggtaaagcaaaagcgcccaagtccagcactccctgcgggggctgcagcctcacccagcgaaagcatccatatggggtcacagggctgggcggagtggggggtgtccattgccctctgggctgccatgggagatgtgcccccaggctctggcctcagctgaccactgccagctgcttgccagctggagagcaagaaacccccaaatcacgcttgtaaacaaggtgccagatgctgaattggtttaacttggacagcagcttggcgacgctgagtggctcctggcccagacagcagcttgtcccacagctgcagcccagccccaggcccaggcctttccccagaagcatctcggcacacaccctccagaactggggggctctgcttgctgatggctgcaccctggctctttgctgggccacatctggctgcaatttggggaaagttgttcgcttgaggggatgccactctcacctcattagcgttgtggacactcaccaagggctgttgtaggttgaagggtatcgcccccagaagacagggtgaagtcctaaccccagtacctgtgaatgggacctcggatggaaagagggtcttagttgaactgtgtcgccccctgagggtcttagcagatgtcatcaagttaagatgtcacaggttaagtcctaatccaatgactggtgtccctgtgaggaaatcaccacatggagacacagacacgcaggaacagtgcggcacggaggcggaggcagaaactggagccacaagcccgggagtgcgtggagccaccagaagtgggaaaaggcaggaaggatcctccctggagcctgcagagggagcgtgggtctgtccacaccttgaggttgggcttctggcctccagagctgggagaggccacgctggtgccgtaagccaccgggtttgggaggagggggcggcggggaggaggctgcaggcggaacaccccagcacctgctcaaacccagctggggaggcccagagttcccacttgcttttgggcattaggcaatggcaaagttaaaagtgaaaataaacctggttggaagttctatgaggaaaacaaggattctaatgattcactcactggttcaacacaaagtgccacaccaggctgagcctccctgggaaagaataagtattaggaccgagaagttactgttccctgagcagccttgttgtaacaggaggctccatttgactgggtgtggcggctgccacctgaaatcccagcacttgggaggccaagacggatcacgtgagccagagtttaagaccagcctagacaatatagtgagaccccatgtctgctaaaataaaaacttagcagggtgtggtgtgtgcctatagttccagctactgggaggctgagacaggataactcgagcccaggaggtagaggctgcagtgagctgtgattgcgccactgcactcctgcctgggagacagagagagaccctgtctcaaaaaaaaagaggctctgctcatctcacactgactcctgccacatacctcaccaagccctgggcacgcatctgacctctgacctcagggaggccatgcttagtgcttagtgtgaacccgcttctcagaggagattgaggctcagagaggccatgtcacctgctcaaggtcacagaggtactgaacagtgcagctgggattccaagccaagtctgttcccagagcccaggtcaaaccaccacactcacaagaccaacatcagggctgccttcaggactttcagaattctctccatttcctgaaaccaactcatcctagaactctcaagccaggagctagcagccccttttgccggggcagccacccttccctcgatcagcagccaggcccagggaacgcagggtgaaatggacgtcctcacgctggggtctacctatcagggaggggccatggccctcagaaacaaggtcagcaccacgaacttggcagcagagccccaggagggacgcctccccctccaggaacagagtggggttcaggaaagacctgaacagggacatgggggccaaggaggagggaagggaggagacagccctgggcaaggcaaggggtggtggcgcttgggcccatggtgggtacggcaggaggactgcaggcacccagcccatgccacgtcccatcctgtcccagggatgccggccacagcgcaccttctaacaatcccacagggcagggatgtgctgcacgtgggcagcatgctgcgctcagaactgtcaccatggaggctctgggcctgcagggggtgccttctcagtcacaggcacttccctgcgcgtcgccacgctctgcctccctccactcaagtgggctccactccacgccaggcctggtgcacacaggggtgcatgaactctgtggaaggagggcctatgacagcacccagtctgcctggtgtcaccatccggttctggacactcaacatgcaggactgagggagaaagctgtttccatgtcaaacaacagggcccggggttagggaaaagcccaccacacctgcggagctcggcccgttggggtgagcccgcttcccctggagtccacaccttagggccttgccgctctgccctggagagtcaccaccttgttccatctctcccgccttcctgaaggagctggccatgccaaatgcatggggcctggctgccacatttgggcaaatccatccctctgccccaatcatccctctgaccctccctggagcagcggccaggcatgtccgtggggggacatcttgtggacaggcctgggtctgcaggcaccctcagcctggctacggccaggaacacttccaaggatggagtgcaccgcgacctgcgtgtgacgcaacctgcatgtgacgtcatagtctttgaggacagagtgctgtgttctgggcccaaacttccccaaccaaagaccttagaggaacccaatgcctccacctgcccgaaggccaggggcgtggggcaactctgatgacctccaggtaagcaaggagcacgtgccagccttgacccaagagctctgtgtcggcccctttgctgcacacctgcaggggctgcctctgggaacagccgcccagcaggcacttggacctgtggacagtggctccctttgagaaggaaccgcaacaagcagccagtcctgggcccagagcccacagtcactcctggaggtgagggctgtgggaggcagggtcacccaggtcctgtggtctctgggagaaggacacagggtgtcgggcagccaggggccatctgggcagggggcacacgctggacaggcagggctcatggttggggttgccctgggatgggctgaggtggttcccagaaatggaatcaaggcagggggagcagtggagacccagggtgtgacagacccaaagataccgagctgagagtgatgtggggaagggcggggctcagcagggaagtgacagggagaggaggggtgccagagaccagtggctgtgggatgggagatgtggctgtgcaggggcctctgggaacaggtgtcagtgacagtgccaggaggaccccggcccacatgctgggtctgaggaggtgggcatggacggtgtggcccggttcaaagaatgcgaagagatgcacagggctgtccatgtgtccctgtgtcccgggcactggtaccagtggatgggggtgggggcatgtccagaacccacagggctgggggtctcaggggtaataagggctgaaccctaaaacccatttcagagcactgacaacgtggagatccagaccccgtattcaggggctgggagaattcaggggacaatgaaccctatgtgtggggggtgacagggcctgaggaaaccctcagccagcccaggaacccccagttctgtatccaggactgacaaggtcccaggtgaacccaacccctgtgtcctgggctgatgagggcccagactgaccctgacccctgtgtcctgggttgacaggggctcaggtcacctgaacctctgtccagggctgacaaggccccaggtgaacccaacccctttgtcctggcctctgtccagggctgacaaggccccaggtcacctgacccccttgtcctgggctgatgaggccccaagtaatcctgacccctagtcctgggctgatccggcccccgtccccgtccctgtaccccgcgtcctgggctgacctggccgggcccccactcacctctggcgctgcccatccaggccgaggccggtgggcacctgcgtggggctgagcaggccctggggcgcgggggtcctggcgggcagcccggtggggggctccggcggcggcggcgctggcggttcgcgggcctcggcgggcggcggcgggggcttctctccgcccgggcccaggctcgggggccgcccgtccagggagatgttgttgaggaagaaaagcgcggcctggcggcgccgcgagtccccgcgcctccgcagcgcctgcggcggggcccgagcggccgaggtcggcgcggcgggtggcgggggcccggcggggccgggggccgggcccggggctccaccggccgcggccgcggccatcctcagactgcgcccgccgccgcgaagcgccccaccccctgcccgcgcgcccgcgcgcccgccgcccattggccgcggcgcgcccacatgcaaatgtatcgccgtcgcgctctcccattggccagcgaggtgccgcgctcagggcgctcccctgggtcctagaggcggtcggacgcagcagcagggagtcgggagctgcgcgcctccccgccggttcgagtccccgtcttgggacctgcggccgcggggctctcgctttctgttccctttgctgtatggcggccttcgcggatggcctccatcgagcgcacattttaaggctccggacccagggcggcgtgggtgaggccccagcacacttccctgtccggaggtgtgtctgggcggcgcttcagcgggcgcagggcggcccctggaggagccccaccgcttcccggaagggcccgcgtgccatctggcctccttcattgacagaagggaacgagggtctgagtggagaaggcacctgcttgggatcaaagccccaggcagagtcctgcacttcctgcagtagcaaagtgaccttgagcctgccttgtgcccaggcctgtttcctctctgtgcctgggtgcccctgacttcagaacctgtgagcccgtggcaccgggatggtcagggcctgcctctggagcccgggagcctgtctgcagtctggaggggaacccgctgtatctttgtggagggactcaggaccttgcacccacctctgtgtcacctgcctgctctgtccagctttctttcatgggtttacgtatctttaaagaggggacaatgatttcagcctcagggtactgtcaggatgaaactggctcagtgagggggtcgggctgtggccggaggccaggcacatgcagtggtcagtccgcgaatgcgctgcagtacctcgcacctgcccgcatgcgcccagcctctcctgtgctgggtgctggggacccggtgggaccgacaggcacagcgctggccctaggagcacctggtgtgtggggaggcagcatgatggccaacaaggcagtgggcgagtgggcaagacagggtcttcatcaccacccctagcatgggcccctgcccttcaggcccctacccacctcccgcctgcctgctccctcctgtgggccttcacgggccaccattggggctcacgcagcatgcagcacctccatttcctttccctccgcccttccaagttggcctccaaggcctctgccaggcctaggggaaggtgggcagctgtcctgtctaggagaacgcggggctgggtggcatagcagaggggtggctgcggattctggatccacagaatggggtgctgacttgtgtgcctgggggctcccgtgagcggggagtgagtgtgtccagcgctgtagggtgctgaggctggggcaggcacacagtgggccctccatccctgctggctatcaccaggaggaggggcctgacaggggagggtgggccatacaccagcagcttgcagagaatctggtgtcagatgagaacagaaaggggcgagtgagggtggagggcaggacgcaggaggcaggaggcagctgtccgtgctggctgcagcgccgggtcctggggatcggctgtgcagtaggggggcccctagccagttcttctttgctggcgctaagctagactttgagggacaaggaggaatgctgaggaaggaacggggtctcttcctgggtctggtgaacccccttgctaggctcccgctgccagtcttctcccctccccagggtgtcgatgggtggccaaaagccaacctggcctgcgggcagtgtgtagggaacacacggcttttgtttcgtgtgattctggagaaattaaagcaacctttaacacacctggacttccctcttgggagttcagtccctctggcctctcaggacaacaggcagacatgtcacaggctgcaggtgggaggcagtgccccctgagtcaggcccgcaccccagtctggcccaggcctcacccagcccagtcgttggcccgtgtcctgccatccctgtgatgcgtggttttaaatgcccagctcaccttggtgctttggctgcagagggccctgctcatgagtttcgctccttattttctttggctctcaccctgaactctgagcaggtgtcaagcgcagggctctgtctggatgctcctgactgcaggcctggcccttgggctgacttcttagtttcccccttgccctggcacccctccgtggcccccacctttcctttctgcctgatccttgtccatttttctagagttggggtctcagcaaacttcccagaacatcctagctccttgcctacttggcacactcctgttcatccctcagaacccaaatttgggttgcaggtgccacctgccttgacctcccagggacacctgctctcctccccgtcccccaacactggccatgacttggtgccattgctcctttgcccaccgctccctgatgcccagcagaggtgtcagtgcccagtgtctctgccctgtaaggggcagttctcagacttcacatttaggagaattacctctgggagcttcttaaaacacagactccaggctcacctctaaagtcctggttcagtggatccggggttgggcccaagaatctatttcttaagctcctcccacgaagctgggagggactgatactcatcctcccccgaggagcagacagccttgagtgctcccggtggagtcctggcgagctgccctgtggctgccaggccagggactagtgaggaggggcaggtgcacacggccgccgctgtggccaggcacttccccgagggtgccctggtcccttcccgctgcagactctgcagaggagctggttttattctgccctcccgcaagggggtgacctccagtccctggcacagtcagtggtgtcctggggccctgccagacacatgcacggttcttcaagtgtttattctccgtcactcaggggacccggtcttcgagggtgctgccgcccactgtctccctccaccctcactgccagacatctgtttgctgtcagcccacgagggggcgtccaagattgtgcttggagcttggcgggcaggggtgggggtccgagtggtccgttgcctcccagagcgtgggcactgcctgggaacggctgcagtgcacagcaggggtagggctgggctggagcctgagtgatcccgcctccagtccccacacccctcagggagcaggtgctgggctgtgggaggggccgcagagcatttcccaggtgggtggagacggggtgaatcgccagcctgagacccctctcggtcctccagcccctcttgaagtgggccaggatgtgcccgtcaccggctcttcggggttgcctgctggttgggtggtgtgccctctccaggctgtggtgagcaggcagagagctgccctgggctcactgtgggttcagctgaggctggctaggtcttctcccagggttctgtgcagggctgcctgctggttggatggtgtgccctctccaggccctggtgggcaggtggagggctgccccgggctcgctgtggaccctggtgcaggctggctaggtctcctcccaggggctgctgttgggggagggactgtggtcctcggcgtcccttgggctcccgggcccctcagtggctgtcagtttccttctccctctggatggctttttggaggctatgggaagtggccggaggtcaggccggagctgtgtgccttcctttgaggcaacactggctctcacctagggcctcctgggtctcctctgggcacggggagctgggtgcttggggaagtttgctggccacccttgttcctacagaaaccggtgcccagagcaggggtagcccgatctgagggtgaaccctgagaattgggtggagggtggacactctccccattgtgtgaccccgaacacggcactgaccccagtggcccccttcctgccttggagggagccaggccatactggctggcctgacactggctgcgggcctcagcaggcctgcccccgggctagggccacatgggaggggcgcctggttcctgcgatggtccggggacggggatcctgccgagatgctgggcttaggccatctctgaggcacagcaagctcaggctctgagttgaatgggtcaggtttgaatcctgacacaagtcccagacctgtgaccttgggcaagtgacctctcccctctcagcctcaatttctgcaccagccaaacagtgatgatcctacctgctgggcagggtcataaggctcacaggcagccacagctgcacccactcttctggggcactaggcacgaggatgctggctctggcgctgagctgtgctcatgctgggcagggacctgctctcactgatcgccacagcagtttctcaggagcccctgccagcgtccctggtcccggctcaggtaggagcacaagggtgtgctggctcacagactgcaccccccggggccatttccacccactcagcaggaagtgcctcaaataagggccgtgctggtctctactgccgctccgggcagacgcaggccatggccacctgccggcaacaatggcacacagtggcggcaccaccccgcctgctgcctgcgggccttgcccggagaaaaaccagggccatacaattaggtgttcaaagtctctcatgggctcctggaccccagctggagctgccattgagcccagagcaggaagtgaaaagttgtcccgataccctcggaccagggccgaggctcctgccggcattactgggaggagctgggtccaaggacactgcccttggcaaacactggagccgtccgcaattccccaggggagcaaacgtgcccccatgcccctcggggctgtgccttctgcgctgaccctgtctgcaggtggacaaggggccctggggatctgctccttgtggcagcggcttatcctgtgcaccaggacacccttccttccaggatgatggtggggacaatgaccatcccctggctccttctctcaccgaaatctcctacgatccctaatgtcagcccccttacaggcgaggagactgaggctcagatttggaaggacctgacaccaacctacacagtcagaggctgcacaggaaggactcactccggccaccctcgccctcctctgtggggttcatttggggagggttgaggttcatttttggctccatcattctgaggctgccattctccaggcagccaggaggagaggtggcactggggagaggtgggtgctgtggctcccctcgcccccttccctgcacctgccccatgccagctgtacctttgtccccaggctccgaggcccgcttcctcttccgtggtggaccctgcccgtgctcctgggtgcagatgcactcaggcccctccccggtcgtgctcgtagtggcctccgcctgggagctcaggcccacctggggagaagggggtgtggtcacgaggaggactgcctcctggccctgccctgctgagtgtgtggcctggacccacctcgctgcctggggtgtctgtctcatccagttcgtcggactctggtctcagcacttcagccttgctgggctctgaaggatgcagagtgtggggtcaggccaggctggtggcaccgggagtctcccgagcctgccagactaggatgggtggagccaactctgcagatggggaaactgaggcacggagggccaagtgacctgccccagggcactggctgacaggaggccgactggggtttgggcccaggcctagtgtccccatcagttggggttcccgcccctggcttggatgctgcatgatggggcactcacagcctgcttgccagccctaattgctaaggtgcttttccccctcactgagtgttgttagagaggctcctgccaggccctcggcttcctccggtgtctgcaggtggaagagccaagccctggagcctggggttgccccgtcagatcggcagggcagagctgggcctggagacacccactcctggtgggcactgaccaccaccctctctctccgtggggaaaacacctcccagctggactctgaccccaggtgctgactgtacctgggtggccgtccaggtcaggcggctgtgggtggggaggcggctgtgggtggggaggtggcagaggcctccctgtgtcttcatcttctgtactgcctggagaggacaggctgagctgggaccctggaagtgggcgtgaggggtcctggggggaggcaagtaggtggcttgagtttatttgggagacttccttgccgccaactcagccctggacagccggtgggacccctcttgaggctgcagctggtggaggggcctgcctttccctttatagtgtggatgaggcagcctcgctttctccctgggaaacaacttggtgggcagagggaaaagagcagcccgaggtctggggggaggccggcccggggtgggggacgtggaggctgaggaccgggtctgagccaggaccgggctccttaccatgggagtggaagcctcctcctgctctggcactctggtccccttggtgccattgctgagtgcctggggactgcgagtcaggggtccggactgggtgggtggctcggggctggcagtgtgggcagcggcagggctgagtgacccatgctggccggccggcttgggagtgtcctggccccgggcccggccccactccgagaggtccaggggcttgtctagggcacagtcctgcgtggctgcagcctctgtcctctgggcgcggcccgggcctgcaggctgtgtgtgccgccctccagacaggcctgctgcggccagagctgccctggtcccctcattctcagggccctcagagtctgagccgactggtagggagggcagcatctccccgggtgtgggctggccccttggcctgacactgcctgccctggccctagcccgcagctgctgctgggccaggagcaggtgcagtgccccctccaggcgaaggtcctgcatgcccgccagggcactgggcagccccagcagttctgtgggctcctcccaggcctctgcttctctggccttcaggtcctggagccgggggtcgctgggggctgcagcaggggccagggggctgctgtgggggctctgaaggtgcagggacagggggcggtttaggaggcagagccggtccaccttcggggagagcttcggggcctcatgggtcatggcggagggccgggaggcccgcaggaagctgtgagggaggagaagccgaatgaccatggctgtgtggagccgtgaccgtcccagcgagccctgagagggagagacgacaggcacccactccacaggcgaggaaactgaggtccagagaggtgcagcaagctgcatgggtcccatggcaggtagtggagggaggggaggctcagcccccagctctggaggccatgctgtgtggacctggccagaggtggcctgtggtctgggctccaaggtggggccagatgccgaggcctccgtgtcttcttggcagggacatcggccccctgctcctcacctggagggtcctagccacctgtccaccctccacaccctacttgttctcagacaatgtccacatcccctgcccccacgccccaggcctggccactctggaggtgtccacgtgggaactttgctccaggctgggtgcccagaaaaagccaagccagagaagttcagggctgtgagggataatcagagggactgccctgggaccaggggctgagagaagagctcatctgaggctactctgggtgagggtggggcaggcgggcacctgtccagggagaggccacgctcatacgctgggctgggtgggctgctcctggcgggcagtggtgggggcgtcccattggcggggcctcggtcggcagggcaagcctgggacccaggccgcaccacggcaatggtcccgtgcagctggttggagatgcgctgggggctctgtgaggatgggtgggtcagcctgggcgggggcatgcgtggcctctgctgtggcctctgccatagcctctgctgcctgccctgggctgctcccactctgcccctgctcactgctgagctgcacccccacccacgccaaatggagcgcagtggctcctgcccgggacaaaggaggggcacattcagggttaggcgcatgagaggctggcatactgaaagtgcagctgcctccagcctcctgcctgcgccggcccagctgcacatggtgggctcccggtccctgcccttaccatgtctggggctcgcgactcaggcagggtggcccctggggagattttggccactggagatgtcctgtgccctgctggcttttctgtgggaggagaagccaggggcaagagcttgggaggtgctcagaggggcagcggcccagccccagggggaggatccctggtcctgcgggggcccagcctcccagcctcacccggtccccacagcaccttctccccgtaggcccacgccctggtggtcttcctcagcctcctcgtggcctcccggtggcttctctgtgatggccttccagccaccaggggaggggagcagcaggggtgagggggggtccgaggtgccctccttggcccggggcttgggcctgtctctagaggggaggcagagacagggagggtgagggagagcagcatctcgggagatgatcagaaaagccgggcccactcctgggtgaccccaggtgacgcagctgtcccgacactgcctgagagtcctccatgggcggttcccccagggacgtgtgctgggtgctgctcggggggtgctggggagttgggtgtctgagccctgggaccctttcccactcaccccaggccccgaagccgcttcacctcctccttcaaggtctcgttctcttccttcagcccgttcatctcgttggctgcaaaaggcactgatgagcaaagcagccaggggttgggggggacaggggcaggggtggggtcgtcacagcaccagggaagcccctcagcagtgcccccagcacgtagcccagggcctggcaggcagcaggggcgccgtggatgctggctgcgtgcatggctgattggatgctgttgaatgagcagtgccggcctcgagggaagggggcttgcccttggtcatcaggagggccactggggcctcagcactgcaggaccttccgcatctcaggaaggaggccgcgcccagtgggggccgggatgcccccagcccaggggagggaggctgtgttgagggagggccacaccagcgccggctgggggctttgtgtgtttgtctgtagattgggttgtgaggttcccccagtggtgtggggccgatcgtcctgcctcctttccccatgcccctacatgggctgaacaggcctggggtcgcctggccccgtgggagaggaccccggttgtctggtgggtggggctcactgaggatgaagatgcgctgcaggttctgcaggtgggagctctcgaactcctgctgccgcttcctggccagctcctgggtgaccatgcagcggtcgcacaggccggcccgcagcctgcagggatggggacgcagggggtgtgagggatggcacggaagccacagagggcctgggacactcactgccccactgctgggaagtgcccctgccctttgcaaactattccgtagagccccaggcctcttcccaccccgtgggctaggtgtcccatgttccactgagtttggggagaaatcttgaaaatgcaatttccttaaggctctgagatgtcctgcagtggggaaaccttcctggttcagtttatcctggagtttcccaaactcattctccgaggagccctgtcacctcctcctctcctgagcccaccggtcctggccatgctgcgaggtgtcctcccaggcccacctgttctccagcacccgcaggttctccttcagtgtcttctgctgttcccggagctggtggttcttggagaagagctcctcgatcctctgggcgtccctgtggtgggaaacagctaaagtggggtcctgttccatccaggaagccacacgctgtccccaccatccagcctgggggggcagcgcgattcggcacctgcagccttggtctgggggcaacgcctaacccggtgcccccctcccagtcatctgcacgctcctctgtgacgtctgtcccgtccacgcagcccccccagtcatctgcacgctcctctgtgacgtctgtcccgtccacgcaacgcccccccagtcatctgcacgctcctctgtgacgtctgttccgtccacgcaccaccccccccagtcatctgcacgctcctctgtgacgtctgtcccgtccacgcaccccccccagtcatctgcacgctcctctgtgatgtctgtcctgtccacgcaacgcccccccagtcatctgcacgctcctctgtgacgtctgtcctgtccacacaccacccccccggtcatctgcacgctcctctgtgacgtctgtcctgtccacgcaacgcccccccagtcatctgcacgctcctctgtcacgtctgtcctgtccacgcaacgcccccccagtcatctgcacgctcctctgtgacgtctgtcctgtccacgcaacgcccccccagtcatctgcacgctcctctgtgacgtctgtcctgtccacacaccgccccccctgtcatctgcacgctcctctgtgacgtctgtcctgtccacgcaccactttagtgccacagcacaggcaggaccatagccgggtctataagccagaacgcagggagcctgcccgcccgccagtgtctgaccagacatgaccccagctcaccgtgaacgtattgttgatattctgatcatgatcctggggtgggagaagccccgagtagggggcttgccccgcccctgggaggccgacgcaactgggttcaagtgctggcttcgctgcctgctcaccgtgtgaccttggacaagtgactccccccgcccccacactgagcctcagtttcccttctgcaccataggacggtggtagtgctggcacactggggcttcagggggatgaagtggccagtgtggtccctgtgaggaggggccctgcttggcctgactcaccggcacctctctgagttcagttccagaagcttgttctgcaggcctgggggagcaagcagaggggcggggggtcaggcccagctgctgcttcaccttcagtgtccccaccacggggtctgggcagagctgcaatgtggcactcctgtcccctgcaccccctgggggagccctgccaggtgagcccctgtctgtgcccaggcacggggctgcctgaggctcggtggtctcggcctagcatctgttgcttcccctggggtctctgcctccggcatctgtctgggggtgtctgggggtgagcagggaccctggtgccacaagtgaccagccacctgtgaaaggtagagggaccgaggggccattttgtgtgtgtgtgtgtgtcatagctagtgttgaaataagataagcttctggggcggaccccaccagaccctctccttgccgtatcttggggatccaacctgggcctggctagccccagcagccccacctctctgggttgcctaggaggcagccgggtccttggacctccaggtgggtgtgggtgctcagtggaaagaccacggggaggtgctggccctgggactggactgggggtggtgtgggggctgcggccctgtccctcgtgggggaagtggacaggggtggggcctggggcgtgtcctagaaggaagagaagagttgcagctcagtgccttgacatgttctggatgggtccagagagccataagctcctgtttctggaagtggctgtctctgccctggtgagctcagcaggccggccagggtgggtacttctttctgccacgctggaggccggcccacgggagaacaaagcatgggcagcatggggcctgcgggtggcaggtggccatgaggtgttggtggcaacccttgaaagtgcccctccccctcggggtcacactctgggagtggctcgaggacatccccgcttgaggtcagcactcgggcccaggcagggtgtctgccacgttgtagctctgggccttgggtcaggactcccctgcctgggccaaaaagacggggtccattccctgacttggtgggaattggaggtgatcatgggtgcacagtggcctgctccgacccttaggtgagggctgtggagacccctccctagcctggcatctgtccctggcccctcacccaggacttccttctcgtggatctccttcagcctgttcagcgactccatgaagctctccatggctccctgtggccctggcccgggcccctctgcgctggggttgtggagacgcctgcagcctctactgcccctctgtgtccatcctgaagaggaggaagaggggacagggatccgctcaggaagggcttgtgggctgtggagtccaggagaggattggggctccttgtgtctgtatggagcagaccccatgccatgctgtaggggctactcatgggaggtggcctggaggctcccgaaccccacgggcaggcacagagatagtacattgtgtggcttcctcccacacgtatgtggccgggggccagagggcagggtgctggctgccgtgcgggaggggctggaggggccagggagcatctggggtgagtgccggcacctctgagccaccccgttctccccaggtatccagcccatcagtgcctggcctgtccccacataagcccttcccctggcacctcaatggagggacagggaagcctggcaagagctggatggtgctggtggcacctgcccagctgtgaagctgggagtcagacctcaccagtaagagccccacagaccctaccatgccactgtccacaccccggccccaacaccactgtcacagcacctccttccctctcaccagagccctgtactcagttccctcctgggatctctgtccccctccaatgccgtggcagcttcaatcctgtcccacaggcacacacacacacacacacacacacacacacacacacacacacagatagcatgtgcacacaacacacatgcacatatatgcaaaagacacacacagagcatgtacacacataacacacatgcacaaagacagacacaccacacagcatgtatacacacaacacacaggcacacacccagagttacacacatacaacacatatgtacacagacagggatgcccacacacaacacacagagacacatagacatgggtatacgcagacacatgctgacaacaaagctgtgcagacatagagacacagctacacatgcagttgcaggtacacggaaacacacacagccacagcagccccctctgcccggaagcggctcccacacgcagatgctggaaggttccaggaagaggtaggagccactctgaagaggtcacaggccccctccctccctgcctgcctcccctacccacaggtctcaggaggtccttggtaggcagtgggtatcttgtggtctcacggactaaggccagaattaaggggccgtggggcctttgcaggctgggcctggggacctgggctggagcactcatcgtcaaaccctcccagacctttccaaattcccagtggcctggagagctcccaggcagggctgggcggagtgagcctgggggcgctgtgactgtctgtctgtcctcccctgacccttccccctcctcccacagattggcctccaggcctgggaggttgggataccggtcaagtggctgggcctctgcaagccagtgtttgtggcacacaaaccgctgcagttcagacttcttcaccgggtggcttgtgcttcacgcggtcgggtgggggagtgtgtgtgtttgccgtgtgtgtgcacgcccgagccagtgtgcatgtgtgtgccgtgtgtgtgcatgatagccagtgtgcgtgtgtgtgtgccatgtgtgtgcacgcccgagccagtgtgtgtcccatgtgtgtgcacacctgagccagtgtgcatgtgtgtgtgccatgtgtgtgcacacccaagtcagtgtgcgtgagtgtgcgtgtgtgtgccgtgtatgcgtgattgccagtgtgcatgtgtgtgtgccgtgtgtgtgcatgcccaagtcagtgtgcatgtgtgtgctgtgtgtgtgtgatagccagtgtgcatgtgtgtgcacacccaagtcagtgtgcatgtgtgtatgccatgtgtgtgcacgcctgagccagtgtgcatgtgtgtggcatgtgtgcatgataggcagtgtgcatgtgtgtgtgccagagccagtgtgcatgtgtatgtgctgtgtgtgcatgctcaagccagtgtgcatgtgtgtggcatgtgtgcatgataggcagtgtgcatgtgtgtgtgccatgtgtgtgcatacccgagctagtgtgcgggtgtgtgccatgtgtgtgcatgcctgagccagtgtgcatgtgtgtttgctgtgtgtgcacacccgagccagtgtgcatgtgtgtgtgccatgtgtgtgcatctgtttttgctctgtgtgtgcgtgcccaagccagtgtgcatgtgtgtgtgctgtgtgtgtgcatacccaacctactgtggaaccactggtgcgtcacctgaacaactgtgtcggcctcctccctgcctggcctcctgctcaaccttccctgaaccccctgcctccccccatctcttccaggaccactctccatggtggccatccctgggaagctctggtctctgctcagatgtgcaccgctctgctcaaaatccaacttcgggctcgcagctggaggccatgcccaaggcctcgccacggccagcccagcccaagtggatcacagagcggaacagccatggctgcatctgggttctcaaaggtcagcctggagacgcccacgtgagggtcctgtgtgcaacatcattctacagaaccgtcccgaacaggaccgcctaaccccatcccatgacgggtggaatatggtggccgcccagccccatgcccatcccagcgtggccaaaccacccaagccaggcttgagggtgcattgaacacagaaagaggcacttgccctggggccctggaagtcaggtggtgggcgtctttgggggtggggctggggtgcctctaactgagggtggcaggccttggaccccgagagaggccttgggaccccgagagaggccatggggcctggggtggggacggggactggggtggggatggcgactggggtggggacggggactggggtggggatggggcccggagtggggatggggcccggggtggggatggggaccggggtggggatggggaccggggtggggatggtgactggagccacttggaaggagggtgtcctaactcttgccgagcccttgcacctgtgatcaagcattagtgccgagcctggtggggcagcaaggggtgtgggacagagtgtggcctgtgttcgggggtggctgcagcgtccccaggggcccctgacagggctagtggggctgcatggagggcggagcaccaggatgctgggctgcagaggctcagtccacagacccgcctgggctttggggcctccagccaccctcggagggagtgggggtgacagttggcggctctgtgttgggtgggtgagggatcctgggactagggagacttggggctttcctggtgggaggctgggagggatgtctttgctggtgaaggggaccaacaggacgctgagctccagaggtggggacagcatggagcctgccggaagcaggtcacgtggccagcatcagtggttctgaccctgtttcccgaactccgtacacactgagaccttcctgacagcccacggaatcttgaccacaccacgaagacctcgctccagatggggaaactgaggctcaaacagatcaagcctcccgtctcagtcacccagtgggaagtgggatctgggttgtgcccagctcctggggctgtgggtctgcatgctctgcctgtgtggactggggcgtcctccccatggctctggtgcacccagctgcactggcttttcctggccaagggggcccctgggaggaagatgtcagagccggggcctccctgggctcaagcagctgaggagggccaggagggggcggagctgcagctcctgaaactccccccagacccgcccaacaggccactcttccctggcccccagcatctgccatgtgggctgggccgacgcccataaaggagccgcccaagggagcccatggtgcctgcgggcctgggagaggtctctggggtccacacgagaggtgggcttccttcccagtgaagtcactgtggtgcagaggctgggacggagcctctgctgtgcctcccactcacaggatcctttctgtgcccgaaaccacctgcagcactcctagagtgctggagagctccggggaagggatgggaggtggagggaagttgcaagccttggtgcttttggggagaagaaatgaaccaggattgtagaaattcacccagacccgcacccgcagccttgagccaggggtcagcagcggggtcagtggggctggctttttcttcccgagtcagccttctctgggtttgttgggcttgccaagggcagctaggggtgctggggctgggggaactcggaaggagggtctcctccaggcctgggtgggggctgcagtggggctgtgatgggggagcaagcctaccggggcggggaggggctgggctgaggctcatggggggcttcacagggctggggtgagagagctgagctctggtccagggtcaccctcagccactcctcccactcccagaccctcccactcgggagtccaggctggagggtctctgtgggtgctgagccccctggaaggagtgggggaaggggagggcaggctagtgagccgctgtcccacctgctgcttgcagctgggccgtggggggggcaggtgtgaggggcgcatgtctgtccccctcgacaccactctcaccccaccatgccttgccctctgctccattttgccactgagaacacgacccagaggtggcgtcttgcccacggtcaaagctagtgagagccgggctgggcttcagctaacccaggccggcagctccgcctcctgcagtgaggtgctactggtgccagcacctttgccttcgggggactgctccttaaaaccaaggggcgacgtgctgctctcaccagaacggaacagagcccatccagtaaacgggtgcctcttatcccccggacagggcccaggagagccctccatggggagcctgaggctggcagaccaccttccacctcatgtcctcatccagggaatggacatgcactgtgggccctgcctgtccctcaggactcccacctccctctaaaggccccccagagcctgcacctgccctcctagggtctccacccactctcccagggcactctggagtggccactcagagggggcagaggtttgctgttgttaatcctacctcacgcattctcagagccccagcagagagggtgcaccccccccacccgctgagctggctggggcggggcaggggtcgcattcctgaagggtgctggctggagagtcagtctgggcggagggtaaaggtgtgggcttcccagtcagcagccctggtggggctctcggacccatctctgctctctatgcggccttgggcaagttgcttttcctctctgagcctgtttcctcacctgggggtgacagcacccctgcccctgtatcaggctgcttagaagctcctcacaggtaatgcctgtgtggccaggagctccgtagacaggagcgctcagtgagcagccgagggagaccccgattcacctgcgcctccctcatgacctgcgcctccctcatgtgggaccccaggtgtccagcagtgctgacggcaggaccctctgtgcttggacaaggtcaagtctcattgccacaaaggccttgtgcaggaggacgcagccctccccacgctcagggcagaggtccggcttctgacggtgatgacactcatccttggacggctgctcactacggactccaatgggctcacggcatctctgtggctacacccaggggagatgccacctgcctcccacacacaggccagggaatcacaggcccagctgtggccctggcaggactggacattgtccggccgagtgccaaaacccacagtgatgcctgttcttaccctgtcctctgggaggccgggccccctgagctcctctgctgtctgagcaggaggcatccggggcatcactgggctccccgcctctccgagggcactcaaccagagaagccgcctgggcaccagtgctccaaggacgtctgccaggccggctgctctccaccccagccaccgacccccagcaggctctttggggcaggagtgcggagctggacactggtaccctccgtctctgaggcctgggctgtctgtatgtccatctgactgactgcccacctatccaggagcaacggtgatggccacagcagtagcagtggcagtggcagtggcatagcagtggcagtggcatagcagtggcagtgacagtagcagtagcagtggcagtgggagtggcatagcagtggcagtggcagtagcagtggcagtgggagtggcagtggcagtggcagcggcagtggcattagcagtggcagtggcagtggtagcagtagcagtggcagtggtgacagtggcagtggaagtagcagcggcagcggcagtggcagtggcattagcagtggcagtggcagtggtagcagtagcagtggcagtggtgacagtggcagtggaagcagcggcagcggcagtggcagtggcattagcagtggcagtggcagtggctgctgttgatcacatactgttctgtgtcaagcaccacaccaggctttttcccacttgcatgggcactgaaaccatcctgcagctttgctgaggaagccaagctcagagtggtgccctctgcaccttgacccgcttctccccaagggattcccctgcccctgtccacctcctggctgcccctgtggaacacccactgcatagctaggttgggcacatgcatgtggccggggcccacctggccttggaggaagtgctgattgtctcattctacaggtttggacactgaggcttgaagcagatcagagatgagcaggtggagcaagatttggacctggacatggcctcagagtctcctcccaccctctgtggtaatgggcaaagcctctcccatggagacttcggccaggtcgcttgtctggccgtgcctcagtttctgtgactgtagaacagatgttggtggtgagccctgacccaggctcctgtgcacacaccgccgcagggcccccgggacagctgcacacgcatgttgtgtgtgcacatgcactcgtgtaccccacacgcgcgtgcgcccgtgcactcgtgtgtacacataaacagaggagccagccgaggtgtccctgcagctcaggcacagcagccctgcaacctgactccctcccggaggtggaggtgggccgggctgctctcctgccctgccggctggctccctgaggcctggcccgtgggggagggggttgagcaaggcccgcctttgtggctgcttccccacagacacagcggcagaggagtcccctgctcagtgcccagctgcgggtgctgcacccctgcaccaccctcacccctgtggctgcgcccgcttatcctcttgtgaacctggatggtggggcgggacaggcccagggtggagggcgaggccaccagcctgtccctgatgccccaagcccctcagcagaccatggacacttcctgggccctggtgccagactaggcctggcctctttgcacccagctcctgccaggaacgcccactgagctctctccgttgctaggtccctggaccaggagcagccttgtgccaccccttagggaagacgtccagtcccacccacccccgcggctctcctcgcaggagtccaagctgggcctccagcctccctggtgagcaccccagccagggatcccagctcacccggctacttgggtggcctggccccggggtcccgggtactcacatggctcctggccctgcctcaacctctgtcgacctctgcgcggagtcccccacgctcttcacagggagagagaagtgagcgggctgtgaacctgcacaggcaacaagacaggattttggccaaacccgcttgacaggttttcgattctcccagccaggagcagaaaggaggcagagactgccctgagccgccaggcgggttctgccatctcgcagaaagtggccggacaggttgggtctgaagccacatagagttgggattgtttcctcataatcactgtgaggctgggctgcaggagccaagctggttagcactgagaatccagtttggtgcctgtgacacggagggcccgggcggggaagggtggggggcttgcaggggtgcctgggtcgggggctgcaggtgggagtgagcaaatgtgctgtctcgccacctcgggacaggtggtagggcctctgacacagagtggtccttcctgctgttcacagctcagctcaccgtgggctgaccataggtaggtgacagtcccctttctggcctcggtttccctgtctgtaaattggggataataagctcaagagctgtccctgccagaacccagtggacagaaatccagcagctgctatgggaagcgacccgcccagcctgccccgccctgcctggggaagcaggccttctgcttgagggggactgggcgcatgctgggcctctggtctgcgcagtctgcccggggtctgtgagtgcttgtgagtgggcttctccagtctccaggtaggctgggtgcccccggccaggtggagcccaggggggcaaataggctgggggctggcctggccccgggtggcacggcccaggtgctggagcagcctcacactgtggtctcgtgtgtgttccctggacagcaacactgtggctgcggggtacagccctgaccccctcatgccttgccccctgtgtcctacccacgacccctccccactccctcctccccgcctccacctccgcctctgcctcatcctcagcctgtcttagctctgcacggaagcagagcgggggttcccgagtccttggggccatgatccccagcgcacccgagtaccccaggaatgcacggggctcagaggaggaagcctgggagcctggcctgtagccgctgccgcgaggggaggacggacttcctgctccctggcagggcccctgctggtggctggtggccagctctgggtttgggatgagggctgggtcatctctggccccacgatgccctcccactcaggaccaggctcttgggagggggttgtggtcagcatgggccactccagctctggctggcctgggaacttcgtggaggcccctcctccggccacctccctgttcctggctgggccctttgtgagtggggtctgcttgctgctggcgtgtgttttgtgtgtgcctgtgtggggactgtgtgcacgtgtgtgtgtgtgtgtgtgtggggatacgaatgtgtgtgcatgtcttacatgtgtgtgcctgtgtgtgcatgtgttgcacgtgtgtgtgtgcacatgtgtgcgtggacatgtgtagctgctttgtgctgtggtctggatgttttttgtgtctaccccagattctcgttgaaatcctaacgccccaggcaatgatgttaggaggcggggcttctgggagatggcaagttcgtgaggctgcagctctgctgggggatcagtgtccttctacaagcggctccagggaggtcccttgccccttccaccatgtgaggacccgagatggtgccgtctatgaaccgggaagtgagtcctctccggacgtggaacaagttggtgccttgattttgaacttgcagcctccaggtatgaatgtgagctctgggctcactgcctgtggggagccctgcctcacaaggaggggtccctctgcatctgccatgcatggctgtttcaatcaaagctgctgtctaacaccaccggctcgaccttgagttcctccctgagcaaagccaagcgacctcctggactgagccagttttcgtgcctgcctgccctggctcattggccagggaccccaccccgccatgtccaggccttggtgatacaggacagaggtgcccgtgcaggttgtgcctgtggctgggtccccagggagaaggtggcaaccccaggccagcagcctcctaccctgaactccaggcaacatcgtcggccccctggcactgcacctgcactgtgggcagagaaggagggaaggctgggagaggaggaggaggtcgaatgtcgctggaggtcggcgtccttctgcagccgtgggtttgtgtgcccctttgttcattcatgcaaccatccaagacccatttcctggctgcccaccaggccctgtccaggctctgggcacatggatggccaagaacgtgactcacacatttacggggcttttggctgtgagaatcgggcacacagagggcactgtctgagtctcagtttacttgtcccttgcagggctgatgagggtgaaaggggttcctctcctggtaccactcacctgttcattcattcagccgatgtctgttgaatcctgatcagccaggagctggggggtgtgatggacacccaggcaccggcgtccgggctcgcaggaagcattgcagaatgaggcagcaaggcctcaacacgctgctggcaaaccgtggccaggtttcagcgtgggggctgctccatcgccccattatacagctgaggaatgaggccccaagtgtgtgtgtggcctcccagccctggcagccacccccacctgcacctgaggggctggggctgctgggcctggggtgagggaccaagagggctcttcatggccccctacacctgcttcctaggccagatgggggcccaatgccccaccccagaggtgaggcagccttttatctctgagctgggaggggtgggagataagcttcaaaggcatctcgctgtaaaacgcacctttaaaagccggccctgctgcctggtatttgtgttactggagcgatagataaagggtggggtggccagtgcagtggccaggtcaggccagccctgcagccctggcccccagataaatgggtcacctattagcacggccctgcaggaatgggactgccttctgtgacaaccggggcccatccccaccctccctgcagacaagcccttgctggcccggctggggggcatcctgatggcgggtgctgtgtgcccatggggccaggctgcactgggcaggaggggtgcagatgtgggccctgcctgggcacttgggagggcggaggctttcttggtggggggaaggatcaagccccccgtctttcctccacatggtctcactgctagtcaccctattttatgttctcatgatttttatttgtatagcttcatggggtttaagtacgatgatgctgcattgagacgttgtactgtgtgaagtcagggccttctgtgcatcggtcgagggtgcaatgcacacggcacccccgagcagccacccatcctcccttccctccaccctgcgaggccccgttgtccgtctgtccacactctgctccatgagcacacgtgacttagcttcgccttgtgagtgagaacctgcagtatttgtctttctgtccgagttgtttcacttaagataacgtaggcaccctcttttaaaaattactttttgctaatacaagaactgcaaggatgccccctgccccctcctgcgaagcactaaacatgacaaataagaccaaagtctccttttattgtcgcgtctcatcccctccccaggtgagccgctgcttggggtgagcatgcttcctgctggatgcttctctatgtaagcacctgcctgagtgtcagccctcttaaggtgaaccgctccgtgtcattcgtacattcacaagtttgtgccgccatcatcgtgatcggattccaaaacattttcatcacctccaagaaagccttgtacctggcagcagtcactgtctctatggatttgcttattctggacatttcataaaaatagaatcaaacagcatttggctcttcgtgtctggcctgtttctctgagcacgatatttcgaagattcagctgggtctcgctcctgttcctggctgaagctgaataatattccagtgcacggctggaccacagtcatcaactgacggacacttggtggtctcacatttccactggtgtgaatagtcctgctgtgaacatgcgtgtgcgagattttggttgaacacttgtcctcagtcctcttgggtgtgtatctaggagtgcaattgatggggcttatggtaaccctaagtttaactttcgtttacttttttgagacagagtttcgctcttgttgcccaggctggagtgcagtggcacgatctcggcttactgcaacctctgcctccaggattcaagtgattctcctgtctcagcctccggagtagctaagactataggcatgcgctaccacgcccagctaatttttgtatttttagtagagacggcgtttcaccatattagtcaggctggtcttgaactcctgacctcaggtaatctacctgccttggcctcctaaagtgttgggattacaggtgtgagccaccgcgcccagccactgtagtatttttaagaagtctaaattaatgggaaaaattcacaatgaaccaaataaccaagttttatataaagacaggattagggtgaggcaggcgagtcccttactcttggggctgtgagagtgtggggtggaatcggctccagggtcccaaggtgtggccggagaatgggcctggtagggagacctgggcatggtgcccgtctccggcctctgtcctgtaagggtttgcctatgcctccgcctcatcagattgctctaaagataggacacagcagcacacggggcccaggctggggtgagtggacccctccctgagaccttcatctgccaccgaggtgaggacagccatcagcctcctcagagccttagggtctgatccctcctggaccggcccacagatccccaacggactggagtcccctgtggctgctcccctccctctcccagccagctcttgggcatccaagcacccctctgcagggaagccctccatgactgtaggtaggtcaggccttttcccaacaggcctgtaagatgcaagtcttgggtagaaactgtgtattggctcaggggtcttcagggtgctaccttcttgagacaggaagtgtttgcccgttcattgctgtcttggcccctggcatatggtggtacttcataaacatttcttcctttctttttctctgaggcagggtcttgctctgttgctcaggctgaagtgcagtggtaagaccatagcttgctgcagccttgaacccctgggctcaagttatcttcctacctcagcctcctgagtagctgggaccataggtacacgccaccatgcttggctaaatttttaaaaatgttttgtagagatgggggtctctcttttctgcccaagctgattttgaactcctgggctcaagcgatcctcccgcctcggcctcccaaagtgctgggattacaggtgtgagccaccgtgcctggccctggtgggttgtgtcttacccagaaaactcaagtgctaagaggcaaagcctaaaggttcctctgggctgagacgggatgggccctgcttggtgagaactggggagtggtttaggggagggctgtgtttcctaaagagccgacagaagccttttactctggctaaactatttgttcctatacctttgttaaatattatgaaaatgagggtacctgtggaatggggaccctgtgtgtggaactggggggatggctgggaggggtcttcccaggccaagtcctggttgggctcttgcctgggatgtgtggggtggaggctccggggagggggcagaggtgcctgggggtgaaccagcgggtaccccgggccattttgacctctgacctcagcttcctttttgagacagtggggctgccttggtgcctctctcctggagggtgtgggttaaatgagaggggttctgtgccagggcccagggctgtgccactcactgagggtcctagcgacactcctgagatggttcttattttgtcaccattttccagggcagtgccagccttggcagacgggccggacagaggagggatgatggctcaggctggcaggggctgccacggggcagcgatggccacctcgagcctggccagtgcttctggacttcctctctgctgactttgttccctggctagaaacagttgtggcagcgctcccagaccgggcgtctgcacggagtggcctcagcttccttgagctgtgggaatttaacgagagtaaaatgggaccataaatctctgtcggtcgggataacttgatccgtgattttggagggcaggccggagcagggacaaggaggtgtctgtgatgggagcgatccccggactgagctgggctgtctgctggcacgtcacagataataaaaccgcgtcgtcctgcagcacacggagactgtgtcagatcgagatgtcataacctgtgccttgtggccaggagcctggtgtcggggaggcacggtccatacatcacagatcccacgcacatcataaagatacattaatggtctatgtgtctttaaagaaatactaatattgttgttttatgagaaactagagttgaaaatattaaaagtcagaattttatggcctaaaagaaagttaaatgatgaggatgtgggaagggagactgaagtatccgtcaccgcccgagccagagtcctggatggggacatggcgggggaggggccgcctggctttgatgaacttggccagctctggcagcctctgtgtgaaccttcggctcagttagaagcttcctccttgggaagggtttggaaagccgagatagaggacgagggcattggggttgtccaaacagttgcatggctcggcagtgggacacatggcaggaacagggcctccaggaagcccaggccctcctgttttggggcatgatcagggagcgtggatggggacacccagaggactcggtctcacccaagccctttccagaaggaaatcctcctggcttgccacatgctccttgtcggatgacaatttcctctggtgcaggtttaaatttttatgtgacagatcggcttgaatgacccttggaaaaggagcaagtgaaggggcagtggaaggcaccgtggatggcaccgtggatggcaccatggatgcctggggtgtcaggggcgaggtcctggcctgagccatgcaaccacatgtggggccgagtcccccagacccagggaccagctccttccaccctggaatctgcgtgcagcaggcgctgatgagcgtctgtggacgagggatggattgacctgggtgaatgcgcctgtgggcgagggatggactgatcccttttcttcgctggctgtgccccttacccacggctgtgctctgtgctggagtcagtggggaattcggggcctgagggctctttgcagctctctcttgccccattgtgcctgcgtgaggacccctgggacacgggcacacccagggtgaggatctgccaaggctttgctcagggtttaagatgcttattactaaggtgagatttccatgaaataaaatcactcattttaagggagtcagttcaggggtgtttagcgcattcactctgtcatgagccagcaccttgacctagttccaaaacattttcctgcccccaaaaggagaccctgtgcccattagcaggtcctccccatccctccctcagccctggcgacactgccctgcttctgtccccggatttgccagctgggtgtttcgtgtcaccgtatccacgccacgtgcagtctcttgtgcgtggcttcttttcctgagcactgtgcttttgagattcacctccatggtagcttgcacctgtgcttcgctcctgttaagttctgggctgcatggacggactgcagtgatctgctcatccgctgatgggcatctgggtggcctccacttttggctgggaagaggctgctgtgggtgtccaggcacactcctgccttcggctcttttaggtgttttgctcaggatttgagacacgttttctctccctcagaggagcacctgttgaagaatcatgacctctatcgagcatttacctggtcacggacattttgctgaagaattcacaagttcatataaggacacgcttcatctcaagtgtccagttcaatgagttctgacagatacggacagtcgtgtgactccagatcacaatgtaggacgttctggtcaccacgggctcctggatgcctcttcctagtgagtttcaccccatgccctgctttctattgcaggagattaattctcttataggattttgtataaatggaaccacactgaggcgggaggtgggacttgaccctagagacagggctgaaactctggaccagattgaagactggctgagacagggaagaggcatctctccataagatacccaccagtgccaggccagtttaccattgccacggcgacacttgggagttactccccctttccatggtgatgacttggaagtaccactctttttctaaaaattcagaatgcaggtatgaatatgagtgcagcactgcctctgagcagctgctctgggctcgctgcctgtgggggagtcctacctcacaaggaggggtccctctgctgctgctgtgcacggccgcttcaatcaaagctgctaacgccaccggctcacccttaaattctttcctgggcgaagccaagaacccctgtgggctaagccccaattctggggctcacctgccctgcagtggtgctctgtgtggctctgatgtctgccagaacaatggactggaggcctgtgtgtgtggcacatgtgccttgtgtgggtggcactctgctcacccattcacctgcaatggccgtctgggtcatttgcactttttggtgattgtgaacggagctgcgataaacatccgtgtgccggttttccaggaacccaggcgcggatggccaggccctgtgataagcatctgtgtaactttacaggaaactgcccatctgctacccacggtggccatgccctttcattcctgccagggcacaggagcgttccagttcctccacgtcttttccaacacttggtattttctgccttttaaattttagtatttcttgttggtatttgtcgcaatttaaagatcagaaaatggaggctcagagaggtgaagtgaactgtccaggctgcacagtggggagggcagggtcagaacctgcccatgacctttggactgtgaccccacctctcagacagagctggtctgtgctggcccctgaggccccagactgaccgcaaaggccttcacttcacaccacagccccatgccccagtgccccctaaagccctcagtggcccccctgcctccagcccattcctgcccttctcctccctgctccagccatgctggtgccttcctctccccagggcctttgcacagctgctcctgctgcccctctcccctggttttatccttcccatgagccgggaacagctccccttggccagcatgtgccctcagcattcatgcagagtgatgcatttgaaatgacagcaagtggcagttgatacctttctgtcctgaaaagcgagacccaggagggcagagaccaggcctgtcctgttggccctgggggctgtgcctggcagctggttgttgatttgggcagcacgagtgtggccgtgaacaccctgctgagcctcaccccgtctagagatgggaggaagccaggggtccacctccagaaaaaggcgctggaggaattattagtggacacttcagccttgaggagaagcaagataaccaggacagcatttccaccccaagactggggcttcggggggacatcctgggagagacccctctgaaacttcaatagtgcccccgcagggtagacagggaccccacctcaactatgggcactgggggtcttgaggtagcctggatggttccctggcctccccaaggccgtgggaggaaggccctggagcaggggtcggccgtctgctactggggaccaggcaggtcactgcgctctgggcgacactgcctgggctgacgctgaggtctgtgtggtccgttacagtccacgttgctttcctcaacacgcacagttacataaacgatgataacacttcataaacatttttctaacatgcggaatgtttgacatgaatttcagctattttaaaatgaataaacaattgtcaatgtcctggccgacagggagcagaagccacagtgctttatggaagatgaaaggcaggagaaaggtctcttctttagagaagaggaagggaaagagacccatcctgtccctctgacggcagggccttcggagagcagccctgggctcgggctgtgggcggaagggccagtggagtccagaggcgagcgccccttcccatagccaccgactgcccggggctcagcgggcaggcagggagatgcctcaggactcacgggtgaggggtgttgggcgggggccatatgggcttgtgagcattgctagctgccgggccctggccagctgcccgcctcagagctacagctggcgccggggagctggcagctgagtgccatccttccaaagacgtggtgctccagggcgcatggcccgtgaccaccaccggggtgtggagacacctgaatggagtcctcactgccggcccggcctgcgctgcctgctctcggcctccctgtgtgtcgcgtgatgttgtgtgccagggttgggcggtggctgtgtgaggcctgtgaggacacacgcaaatgggagagggagtgtgcatggtgtcagcatggggcagtggtgcggagtgactgggtcaggggacccccacaccggacagcacttctggggcagcagtggtgcaggagggctgccgggagctggcagagcgtggctggggacagcagggtcttggtggaaaggccccagttcccttgtgcagagagagaggccaccgctgtcgccaggctctggggggtcctcatgagggcccggccccacccttctgggatcaggtgggggtgtggccagattccattggaaaatgagggtaattccacaggaaaagcctggcctgggtggattcgagaggtggcgcttcctcggcctctcctgttaccctctcttggcgccacaatgctgaaagacacgcagagcacagggtgttggtgaagcactgatgtttacctgtgctgtgctgacaacggcacactcagctttcggcgtgactccctccctaccccaggctcaccgctagggagacggtggtttatccttctatagaggaagatactgagggtctgagaggcacatagcagggaggtcactcgtgtcacaggaagatatgctgaagttctaagccctggaacctgggagtggtcccttgatccccagtgacctcgtgtgggcataagagctttggagatgtggtcaagttgagatgaagtcatggaggtctgacccacatggcggcgtcctcacaggaagctcacgtgattgcggacccacagggagcgccttggagaggaggcgcagcccggagtgaggacgcccaaggctcgccagaagcaaaaagagtctgtagcagggcaccgtgtgctcccagcagcccacacttaaacatgcatcccagcatctcacaacacccctggagcctgtattggggtgcattcgtggcctggcccacaccttgatattggggtcctggcctccatagctgggagaatgaatttctgttgtaagctgctcattttatggaggcctaggaacctgaaaccatccagaaaggcactctatagacattcgtgagagaatgaggaagtgcgaaatccttcagtgtgctgtctgcgtccaccagccaggactcaggactccaggtgaacctcacagcctggtgcttcccaagtcttgttttgaggctcagtgctgagcccacaggcaccctgaggctgggctttgggcttctcgctcctcatgtctggctcatgagttgttctccaggcctttccttgctgggggccactccaccttcccaggcctataacttccaagctatgggttggcccagctcaccctgacctgctctctctctccctccctgcagggtgggatgccgctcctgctctgcatcaacttgccctgcctgctcctcctaccagctcttcccagggtggcctccaagcaggtgttcagccagaatatggctaagtggtgtgtgcagctgtatccaccagcagggcctggcttgaggacccagaaccctggccccacacctgtgagctggaacacctgcacagcagtgccacatgctactggggctgagggtgcagacactgtcaggctccccccaggtccttggacccctgttactgggttgaggcacgcatgtctccacagctgtgtgcactccaagcagcctacccctaagtgcaccccagcagcccacacctgtgccctgagcagcccacacctgtgccctgagcagctcacacctgtgtctccagcagccaccacccgtcacttctgagaattgctctaggaaaccagagccaccttaccaggaagggcctgggagtttgtgtcttctcatcagcccccaaggcagcccataaccaatggctgagcagtgttggggtaacactcggcccctgcctctgaatgggagaacctctgtggtgcaattcatgctccagggctcctcgctggagcagactgaggctggacgcctccaggaccccattctttctcagccctccctaccctgccctgcctgcctaccccgcccttcctccctcacctttctcctgaatgcagcctcaatgtgcattctaagatgcttggtcttaggctctgcttctggagaacccgacccagcaggacagaggtcccaacctgggtagacaccactgtgatggatgagtgtgcgttcattgtgacgttcctggagttgtgattgctttttagttccacgcgtttccccggtcaacagaggctgagcgctcagtgcctgccctgtggggtcgtctcctagagcagcagccacattctggaacagcctggctttcctgctgggaaatggggtgtccaggggtgtggactttgcctggttggggacaggatctgccttgaggcaatggctggttgctgactgaggggtgtccatgtcaccctgagggttgggttcctcaccagggcccagaatgttctttttacagaattgaccactcctttggtacccacccaggtcttaggtaatccctctggctcaggacacccgttccagctccatatctcagtccagagggagatgctgtcaaggggatgatgcgggtgttgctggccccccacctgtggtgatgccggggcccaggaggagggaatggggttacctctaggggacaagggggacttgtgtgtctttaagcaattttaaggatgagtttttttggtgtgtgtttttaatattttgcaaatgatttttataaaagtagctctctgggagggaagccatggaggatgggaaagggcccagactgaggctcctccaaagatactgggtgtcactgcagagccagtccctgggagacgccaggtggaggatctggggtggggctgggggcacagcgggaggcctcatggtttgcagcgagcagaggcagagggtcccacctacctgacctgagccctgctgtctgtgcttggctgggtgtcactgactggtttgcaaagttccacgccatgttggccaaggtcggggtcagctcagagggcacaggagaacctaggctcatagcagagttcccaggcagagccggagcgcttgccccagcacagcgggctttgcatctgctgggtgcttgttctgttgggatgcgcctaggacccctggagggtgcctggcccaggtgtctggagctgaaggggcaactctgggtgctccactcagctctgccctgtagaggggctggcagccttaggggtgtcctgcaggcttcgggggcttcggaggctcctgcagtctgtgtctgaagggctgtttggcgctccttcccagcttgctccccacacaagggcccagtgacctgccctctgctcccagggtcaccagcgtccagcctggtgtgctgccccatccacagcatatagcccaggcccctcctctcctccagctattcttcctctcacacctttggggatccccttcctcaaccccccccttgctggagactcccctaggccattgctcctgcataccctggctgggtcttagctgggcctaggaaaagacagcgcatgcctcttcttccttgggggcaggggtaggtagagccttcccagcgagggcaagggcgagggtggtgaagacacagaaaaccctgccaggtgccttgtgaccctgagaggagggggcgtaccctgggggactgggtgcagggagagctgcctgtgaggcagcctacaggccagcctgggccttcctccttcctccacagaggatgcctcctgaacactgacgggctgtgaggactccacatgcgtctctctgagccactgcagctcccctcggggccggcaccgatgtaaacccattttgagggcgagcacatggattctcagagacgctgaatcactcgctccagggcatgcggccactggggctgagagccaggggtgagtccaggccagtctgctcatggtcagccctgggtgatggtcagtcagggtcagggtcggtcggggtcacaaccagccaaggtcatagtcagggtcatggccagccaggatcagggttggttggggtcacggtcagtcagggtcttggtcagggtcatggtcagctggctggggttgaagcaagactttcaggttctctctggtgtgctgcaggcccccaggtgggttaggaagccccaccgtggcagagagacgtccctggaccctggggtccaatgcgcttgccgtgcaggtggaggaactgatgcccggagcagagatgaccctgcctctcaccaagtccacactgtgctgtcgtagtggggctggtgggaccttggtaacgctggggccccccatgccctgcggattcctgcatttgtgggggccagaggggaaagtggggctagtagaacagcttggacacaaggacactgcccaggaataaccacatgtctaccgtggaagattttaaatcctgggaaataaatacacaccaccaatgaagaaacagtcacccacagccggccacccccagttatactactactatttccattatatgtttccatgtgtatacatttgtctatgtatctatgtgtctatctgccaatcatctatctattgttacggttatagttattttctttttcctccttttacaaaaatgggggggtcatcttgagcttctccataaactgctttcttcactttcacaatatttcatgggtgcattctctcatttttgaatttcacgctatcatttttaaagctgcctaaagtcgcatgggatcaatgagctgctctggttgggcactgggctgttttcccttttatctgggggcctcataaacaacccggaatgaacatcttcgtatggacatctctaggcacatctcatccgaggttatgtcttgggaatgctccccagaagtcgaacctgtgggggctatgccacatccatttctttcttcttaaatgagaccttgactccctggtgacgctgtgcccatttctaaggctgtctacacaccgacatttgccctgcgggagtcctctccttgacccccgtagcagacccgagatgatctatttctacacattctcaccagtgcgggcatcacatctttttcaactttgccagttgctgggtaaaacaatatcttactttaatttgggtttcttttcttttcttttttgagacagggttttgctcttgttgcccaggctggagtgcagtggcgcagtctctgctcaccacaacctccgcctcccggtttcaagcgattctcctgcctcggcctcccgagtagctgggattacaggcatgcaccaccacgcccggctaatttatattattagtagagacagggtttctccatgttggtcaggctggtcgcaaactcctgacctcaggtgatctgcccacctcagcctccccaaagtattgggattacaggtgtgaaccatggcacccggcccttaatttgggtttcttagattacttgtgaagccgacaacttgtcatatttatcagtcacttatatttctttttgggtgaactgccttcacattgtctggtgtcttttttcatgatgaggttttcatctttttcttattgatttctaagagctctttatattttaaggctaataatactttatcatatatgttgcaaatgttgtagaccattgatgttttccttctcatttgtttgtagtgttgtggacatgagggtaaacctggatgtagacatgcctgtcaatcttcccttcctctgacttccaaaccgaccctgggactcatgctggggcaagctgggagtcctttgggattccacattgaggccagttcttgaacagtgtagagaaatctgagtgggatattgctggtcaactcaaggcagggctggggcccagggatgaacagaggtggtgccgggtgtacagcaggtgtttacaccatccttgttgaattaaaacacagctggtaggtgaccaggaagggaggctaaaaaggaagagcaatgagggaggtgaggagcaatgagggaggtgaggagcaatggcccatgaccacaggtctcaggctggggcggctgggggctcagccctgcctgggcatggatctcaatgtccaatctcaccatcttgactcagcattctttttccatctggtgaactcctacacgtccctcagaaccccgagtgctcgcttgtccctattcttgcagtgcttcacctgtgcaggcccctactggagtggccccactcagtgatgaaaccgttgctcatagctgggtggtcctgggatgcctcatctgtgcagcggggaaggggatgaaccagccccttcatctcagggttgggatgaggattcaggagctaaccgtgcaaagggcttggtgccccaggggatgggagaggtggatggagaagccactcccatacctgccagccaccagtccccaggctgggcctcgtcccccatgcctggggcaggagaaggagggtggaggaagggagcagcctggccagcttctggggctgtagggctggggctgatcagtagacccgtcactcagagtttgatattactcatggctgtaaaagtgatccccagcatgcctcgggggtttcagagagaatgtcccactaagtgtagccccttctccagcctcttggcaactgtggctgctggcactgaggaaggaatcttgggttcatcccgggccacatgtgcccatcctgctgtctacagctgtagctgcggccacacgtgcacaccaccatgcccagatcattcttttgtatttttttgtagagatggggttctgccacgttgcccaggctgctcttgaactcctgagctcaagcaatccgtctgcctcggcctcccaaagtgctgtggttacaggcatgagccacggcgcctgggctcctaaactgatttttaatgacacgagtaatacaggaacacattctccttctaaacagaattctaacggcgggggccctcgagccgcggcatcatcccagcacccccagcctcaccgcgagggccctcgagctgtggcatcatcccagcgcccccagcttcaccgcgaggtggctgaggttcccagcaggacatctgtccttctggcctgagagtccgctgttgggtgccggtctcacctggcagcaggtttctccatggagcagtgagacaggaggtttcctcagcagatcacccagaaacggggctctgccatggagcccccggactgatgggcttggggggctttcattctccgcagtgacaggcagggccgtgggatcctgctccacgcctcttctactcacgccttacgctgagctgcccaggacactcccagggctgttttacccacacgaggcacagagaaggtagtggcctgctcaaggccacacagcgaggctgcgtagagctgctgcttgagccagcgtggcctggcctgggctccaaacggcctgcacctgcccttccctgaggacggtgttagatgtaggcacgccactcacccatccaggtctcacctcctggtgtttggaggaccctaggtggggtggggcccgggggtctgtgttcacactgcccagcagcaggggaggcacacagtgggctctggactgtgggcacttgccagctatacttggggacagagtgggtcctcctcggcaccctccatcatgtattcacacacgggtcattcgctcgttcacacgctggctcctctgcccagcatgtgccatttgctcagctcagcgtgggcggcagaggggcacaggtggcgagggcagggcgggggccgggggccacaggtggtgagggcagggcagggcggcagaggggcacaggtggcgagggcggggcgggggcggcagaggggcacaggtgctgagggcagggcgggggcggcagaggggcacaggtggcgagggcggggtgggggcggcagaggggcacaggtggtgagggcggggtgggggcggcagaggggcacaggtggtgagggcagggcgggggcccggggcctgctctccagagccacacaaacctggccagatggctcctgactgggacctcccagggcacatcctcctgtccctccttctctgtgctcgctgccaaccaccacccaaagcagcagccccaggagggaccagggccccctcttatcagcagcctcccccaggcctggccgcagcgttctccctggaaaacctgagtctccactccctgctgctggctcccaccaggccccttcctcaccaggggcatcagcagacgcctccgcctggcagcagacaccggcacgaccctcaccccgcctgggtggccaagctgctctggggagctggctggaagactacgtggaaaccccaccccatctatcactgagccggggtctgcctgtgggcctgggggctctgacggggaaggctcagcttctctgcatgctgactcagcccttcatctgtggggctggaacgacagccacaggggtgtggctggccagggttgagatggggagcaaagcccctgtccccattccctatcggtttcatggaggagactgaggtgtggtgtcccagaccctcccctcccctcctcctgtcccctggggaggtcaccaggggcagcgtcctgcccctgcacccagctctctgttcccacccataccttggagccatgcgcagcctcccgcccacccatgaagatgtagccctggcctcaacccagcccgggtcaccgcacatttgtccatgtggtcgttcattcgtatagcaactacgaataatcctctatagcctggcgcgccctcgcctgtgggcttggaaatggggaatcggggtcccgtggagccatctcctccggctcagtggccccaagtcaggctggctggtccctgctgagctgtggggccggcgtaaagctcacgtggactgtgaatacctgggtcaaacggaagaacaactcgccacgtgttatgctgataacgggctgagctgatgacatttccgacgcgctgggttagcgtacatcgttaaaataatctgtttctttttccttttcttagcacggccactagcacgtttgaagtcacacacagggtagcgccggcctggacagaggcggacatctgacaagcgggccaatgaggatgacatctcggacggtagtcactgctacaacgaaagtcagtgccccaccttgcccagccgcagggtggaccctaagcagctcgccccacccagccggtcctgcctgctctgtccctcccaaccctgcaatgggcagatttctggggggcagtctctgacccactgtggcccaggtacagaaccccgccttcaagtctctgggcctcagttttctcatctgtgtgttggggacaaagacgccgcccggccatctcaccaggctgccgagcagcgtggaagagctctggctgtgaggtcagaggccctttgtttgaaaggtccaggcccataggggtgcatgggttgtggtcttgggtgatattagaaaagctaagtcctctctcctgggcagatgacaccagagggagggtgcgaaggtggtggagaggccggtggcctggtgtgggctgtcataggaaagtgccgcagaccaggtggccgaaacagtggaaatccgttgtcttgcagttccagagttcacaagtccgtgtaatggaggcatcggccggcctggttccttgagagggggtgagggatctgcttcccacttccggcttctggggctgtgccgcagtttctgctgctcttctgcttgtggaagcatcatggtctctgtcttcacctcacacctgctccctgtgcccgtctgtgcccaatttccccttttctcagggcccagacatcttagataagggctcaccccaacctagcatgacctcatcttagccaattacgttaccagtgaccctatttccaaataaggccacttcctggggtgctggggaaaggacttcaacgtgaagttttgggagacacaggtgcgcccacatcaccaggggtgtgtgagcatgatgagcagctcggggctctggacctgtctgcgggagctccgagtcccacggcacttggagctggttgagaatggggctgggagccccaggtcaggttgaattggtgctggggacacatgtctcgtccctggttcccccaggctttattatgacgcacagtttcccgagaagcggagtctgagatggagacttttgtacaagggactcactgagaggtactcccaggagaaagtgggggtgagacgcaggactgggggagctgagctgggaggggctctcagccacagcccagccacagccccagaacctgaaacgcaccccagagtcagccccactcactcagaaggggggtccctgcaccctcctctggcagccattggctgtggtggcctcacaggtggggcccaggggtctgtgttcacactgcccagcagcaggcgaggcacacggtgggctctggacggtgggcacttgctggctacacgtggggacagagcgggtccttccctgcaccctctattcatttatccacacagggattaattcgtttgtccactcgctggttccattcagcacaccccattcgctcagctcagcgtgggcggcagaggggtcagaggtggtgggggcccatgacctcctctctggagctgcgctaaactggccagctggctcctggctggggcctctctgggactcatcctcctgccctactcacctccctctgcctctgtgcttgctgctgaccaccacccaaagaagcaggcatttctgggcgaggtgggtcccggccccctgtggccgaaggtgttccctgggaatggacagctgtgagcaggcggagccacacacagagccaccgaccgggctgtgtaggtgaaggagccacgtggaggtgtgcaggaggtggaacacttaggaccctttcccgtgggcagagacccagtgccgggggaggcctggctgggtcgtacccccagcctcaccctggctcaggacaccggcacccagaatccttgggccactccgagcccagaggcacccaggccctccttgagctacatgcagctttaaaacacacatgtcctttgacctcctcccacccagggggtttctctgctctctccccttgaatctggcggcctccaccccgccccgaccccacacaaatgaatgagcgtccccagccttctcagccctgagcaccatcgcggatggcattgcgggcgcttctccaccgtctgcatcagcccccgacagacggtcccagtgggactgtgtccctattacctgtgtgtccccatcccctgagcggacccggtcgactcagtgccatgtgtacgatgggtaaaggatgaatttgtgaaacatttcagatacattacacttgacaccatgttagctccactttcacctttttcggttcttaatattccagaagccccagtaagacagaagagtcttgggccccgggtctggggaggcacccagagcccttcacggtttcttgactgtcctcggagaggcgctgagctccgggggcgcatccagctcccagtgaattctggcggccactgaggaagcttctgctgagagaattagggaaaggacccccccaggagggtctttgctggagcagacgccccgcatcaccacctgctgcccatccatcctggccagcggctcccatacccactcctgccgctgggggctgaccgtggcaccaactcttttttccatggaagctgccctttggtttatggttgcttcttgtttctggaacctttgtaccaggatccctgcccctgtgcgtggcagaagtctccaaggtcattcaccccggccacgctgcctggggctccgggaccggccactctttcctgaccacgtggctgttcttcaccatcctgcctggcggcttgtcccgccagggctggcagggtcttcaggataaggctgtggccccctggggtagttcctcaggccatagggaggacgctcagcgggcgagagctgtgagctggatggtgtggacctgactgtgagcagccactctctgggctggcagacatcccagggcgctgggctgtagcttctccctcatcactagcggagggcggcctgcggcggagggtctggactgtgtggtctgggccctgcagtccccatggcttcccaggcagcccccaacctcactctgggtgagacactggggactgtgcccagggggcaggcggcctctaagtgcacaaggtgatgtgcccctcccacttccaatgtcccaggagggcggagtgagcccgccttgtgctgggcagcagtatgcaggggtggccgtgcagggccaggcaggcaccaggtggacagtcctgcagcggaacaggacgcccctgcccgtgagcatgtactccctctttgtcccaggacccccctccatcctcctcccaggagcccctctattgcccttccaggtccccccacccctcccagaaccccctccctttccctcccaggatcccctcatccctcccaggccctcttccttcctcccccaggtcccctcccagaaccccttccctccccaccaggcctccctctacctcctagctcaccctccctcccctcctctcacctctgtcagaccaacgtcctggagataagaatagcctgtctccctggggagctgactccccatgaccactgtggtggggggtcaaggggacagagtgccttggcaaggacctggagacccctcgggtcagccctgagcccagctgacctagagcagccaccaagggagctgaagccaatgccttcccccaggtcagacggggtcccgctccgagcctcagctgtggctcttcagcaccccaggcccacctgctccccaccccagcccctcctccacctgggggaggcctggtggggcccaggcctgtggggtcctatttggccggtgccatcttggcatcatcccccaacacacggtggaatcaggggtctcacctgggccatgggggcctgggtggtgacattctgatcagagcaggtggaggcagtgcaggctgtcctaggccccccaccgcgcccgggcctcacagcctcctgaaggatgagcgcatgcatctggggagggtgggcctttgtgaggggagagagaggagagagaagagagagaaggagagagggagagaggaagagagggagagagagggagagagggagggaaacagagagggagggaaaaggagtgcgagagagacagagaggcagggaggggggagggagagagggagggaggatgacaggaagggagagaaggaggagagggaaagagagggaaagagagagggagggggaagaagagggaaagtggggagggagagagagggagaggaagagagagggggagaggagggagagagagggagggatggagaagagagagggagagggagagagaaggagggaaagggggagggagagagaaagagagagaggagggagaaggagagggagagaggggggagagagataggggaggaagagagagggagagggggagggagagagggagggaaagggggagggagagagaaagagaaagagggagaggagggagaagggggggagagagatgggggagggagagagagggagagaggggagagagggagggtgagagtggggagagggagaggggaagaaagagagaaggagagcggggagagagagggagaagggggaggaagagagggagaaggagagagagaaggagggagagagggagagggagagaaagagaaagggaaggagagagggagggaaggaaagagggagggagagaaggaagcagagagggaaggagagagggaaagagagagggagggagagggagagagaaagagatggagagagagagagacagagagagatacatggagagacaaagagcggaggagggcagaggagagcggcctgcctaccttgaggagggcagagggtggagactaatttgcaccttagtcgtgccctcaggctgtccctgtgagaatgccagggtggtcctagcacccaacaccccagcatggcaggcccaggtgtctctcgggctcaggtttgcctcaggcccccctggctctaggaagcccccagccctcctcagtccttctcctcagccttcgctgtgcccaggttgtgtgcctgggaggtgggtgtccgtgttattctagggatgctgctgtcctttgggggtgacttcttactgcctccacttttcaaagcaggaaactgaggttcagagaggttcagggcctgcctgaggccacacagcaattaccagcagaatggtgcaggctctggagcctctttggatctccacccagatcaccctctggggcctcgggcgggcggggctcctccgtaggtccctgtgatgcaaacgcctggggaggaaacgggaccattttccaggcacgggtcagggtgccggggaggcaggctgggcgggatgtgctgggagctggaaaggccccgggttgggtcggagtcagggcagatctgggtgtggctggggctgcggaggaagtctaagggagcagggagccctttattgcactgcctcggtgacatttcacctgccctgtgctaagtggggataactggtcacccgcctggctgtgctcacaccctcaggccagcccacggcagccccatgtggtccctggcccacggactggctgcccttccctggggcttggccactgaggcccttgcaggagccctcgaatgggacccccggtggggactgtgtggtcccaactgcccaatggggctctatggagcacctgctgtatgccaggccctgtacaggccccttcgtgtggtaatgaacatggtctgcacgggactcatcctcctggggctgggattcagtgacaactgcaaactgccagcgacaccaatagctaaggagtcgtgagggtggctgagctccgggaggggcgctgagggccacgcggacccacattggcctggaaggatgatgggacccacggggtgggggacacagccaggcagagggcgcccaggtgggagaagtgtggagccctggcctgggcatgtgagggtggggaggtggggggtgagctcgggggttttgtgtgaagcaggtgggcagagcctcgagggccactggggcgggagtcttggaggccctgaggagccctggggactttgtgggaagggagtgggcagatggcagcgtggaattggtggggagagaaggacaccgccaaggttgcccagacgggtttgcagaccccagggcaggggggtggggtcaagtgaaggaactgtcaccctctctggaggcaggtgcggctgacattggctgcctggggacaccaaggacagccccaaggtcctatggggtcacatagaagtcctgctgcctgagtggggagcgaggtggaggctgatggcagggacctcccgtgggcctgggggccaggacagaggctgccctgtaatgattcctgaccttccctgagcactagccatcagtggttccggggtagaccctgctttttttatttttccttttttttgggtctgtagctggatttaactgtaaagagcaataaattacaaatctggaaaaacatcccttgtccccacaaaggacacagctgtccccaaatgacaaatggctctgaattaacattatttagtatttataacttccgccggacagaacttacagatgttactggcaaatcctgcctgcctttggggtatttttagagcctattgtccatccttacgaggttcctctaacctcgtctctaccaaggaggcagcgtgcactgtctgggcccagaggatgggcccggggtgcccccagctcctctgcagagctggagcggtcctggcatttgtgggcacattcatccatctgcaaggagacagagtgcggggagagggcaggacccccggtcttgctctggggcaggctgaaggagggctgagcagagctgaggccaagtggcagccccacccgtggaaggggattcaggagtaaaggcagcaaggatgtctcagggactggacgagtggccaacactgaccgtcaggcgggcacatggctgggaatcttcgctggctctgcagacatggaggctggggcacagagagcttaccctgggccctccacattcagcagcagctgggacttgaaccctggcccgagccatttcccagccgactgcactctgccagacatccgaggtgcctggcctgccagcggacctccagactctgtcctggacctggactcaagggcctccgacccggccctgagttttgggcttgggggcaaggcttgagctgtgaccaaacctccctcacggccgcccctggggttcagctgggaattcttctgggcccccacaagagctggggggtctaagtgtctcttgggcttccagtgcgtggatgtacaactttatttgagtgtttaatttcccctctcatccacaaaataaacaagggagatttatctgaaagtgactgaacacttccaggctctctgcggagtccgggcccacagcgctgtgagctgctcacaactcaacccaagtgtctgcgtgcaagggaggtgcgggcaggaagcatcggacctggtgttttcgttagggaggttaacgggctgggatggagggccttaaatctttcactagaaaatcccggtgaagcttcggaggaggcctgggggagagccgggccacggagcagccatctgtcagcagaggcacccgctcgaaagtgctgttgatttaaggaggccaaggtattgagggttttctgtgtttagtttaaaatcttcagaaaaactcattagcgctctccctaactgtttctggaagcggtgatctgggctcaggctgagggctcagaaaaggccattggacatggaggctcacggagggaccaaccgttcccccagatccttctggagcctgggccagggtcaccgaagggacgggccctcagcgccgttcatctcggctgatcctatttcagccgaggccgggatgggctttcctggcccagccaaggaagtgacaccctgtgtgacggcggatgaatacctgaagctgccccgcctcccaggccccttctctgcaccctgtcagctctccctgaggcggggagatgggccagagggcaccacattgaggctgacgactgtcacccatcctcggaggggatgccacccccaaatcatccaagctcagggccccaaagtctctcagataattcacgctggtgccccatctcaggctggcaggaccatcgccccggcctcatgctggccagtgcctttggctgacctctgagctttgcttgggggagagtgcccagtgggaggcacggaggctcctggtggcggcccccagcccctgtgggggctcctccccagactccatctgcccccagcacctccctttggaaaggctgttaggagacgcccatgggaggaatctgacggggtcctggcgtggggctgggggtcctgaccatgctgctgggaagggttttctgtgtttccttcaaagcccccagaagagctgccctgctgccttccacagccctgggattgttgctcgagagctggcggggcggcctccgcggggcggctctggctgagcagctgcccagctcggcccaggtcctccttgcccctccctgaccctccagggccgacagggacaggcttgtcaatgttccccctgggacctgcggggcccttgtgcagcaggaggctggttggagggaatgcaatccccaggaggccgtggttaccagaccggggtcggtgggcctggttcactggtctctctccctttttgtctctccgtctttgtctctgtctccatgtctctgcctcgggagtcctccatcctggccccattccttgctccctgcagaggggcagccttgccctccctcccgtgcacacggcgtgccacagactcaactggacccatccctgtcaccagggtctctaggaggtcaagatcaagggccctgcacgtcgcaggatcctgccgattacgaaatgaaggggtgcagaacgaggcctcaaagtggcggaccctccacagtgtttgcagcgaataatctggcatgttttatacacaagcattacaatttagaaatgatgagttccgaggtcaaaggggaagccctcgaagccagcaaagggctgggtcactggggcctcctccccacaacctcacgtcgtttccacatttctgggacccagaatccagcagaccgggcccggccagcgtccacaggcttctcagaagggtgtgcagcctgtgcggcggctcccacctgggctacggccagggctgccgttcccctggacgggctgctgggagcagcctcagagtggctgcctgggaagggcctctccagagacctttcccagccaggcttccctgggctcctggcagcacggcagaccccttactctcgagctcctgcacagtcctgggagagtcggtgactggcaaggatgggtccagctgagcctcccctggcccggagaggctgagtgggctcagagcctgcaccgcctactacaccctgactgcagtcgtggggagtgaggatccggcttcccatgggagcagggcagtctggagacgacagagaccactgcccggcacattctcttcctagccgtctcccacttggagcagtgcccaccctgagggggcagacagcccgggactggcagaggaccccccgcggggtcctggagcccctccacagtgtacccaggagcacagagcggcgggtgcgaagcagcctccccacctgtggcaggacagcacgagccggcgcttctggaatccctgcgggccaggcaggtgctggaaacatcacccggatggagcccacactgcagcctccacatagccacccaatcactaacatccctcctctcagcacctgcttccggggagcctccacacacaggccccggggaccctccccacacacaggccccggggacccccctcacacaggccccggggaccctcttcacacaggcctggagaccttcctcacctgcctccctcagcttccctgctatcctccttggggtgtgtcccaggtgaggggacatggcgcggctgcagggctggcccaggagcccatgaaggctgcctttgtcattttcctccgggttatcaatgctgattcactggagaatgttcaggaaaaagaacttagaataagctataattgtcgagagataaccatcattatcacgcactcccctccagatcaaacatcattacacactaagtatttgtccacacaggggatggatgagaccccgtatatggcttgagaccccgcgtttccgtggcatgtctgcattcttacatctttccagggcgctgatgggtgagggctccttgacacacgtgccctcgagccacctgggcagcccctcttgtttcgaattggaccgttgccattgtcccagggcagcccaggggccggcgatggctccatctgttggagactgggcagcggcatgcccgaggtggggggtggcccctggggcggcactgaaaggagggcccgacgccgctcatcgcaatgtccccacacctggtgcacacgcacatccgggtctcaggtgcacacaccgccacgcaggttgtccacacagccagggacctccttggaggcctgggctcctgacctccaggcaggacggctctgtgtaccgtgacccctcctgctgctgtggaggagggagtggtggcatcagagggcctcgacccctgagcaccatgtcccaggctggacatagaggaaggaggaccattgatctgaggaaacagcacatgtggagactctgagatgtgatgggtcttgtccccacacctgagtggatgcaggtgtcaggaccagggtcccgaggccacggggcagccagggccgggccagctgtgcggagttgccacagcagagcctgggctgcgagggagtgagggcttggatgcaaaggagaaatggaaccagattcccatcatggaaatccgagtcggggccaagtgcaggggcgtgggggatgggctgtggctggagctgggtgcgctgagaggagggacccagctggggttttaccgggatcagggagagcaggtctcgggggcctccccacctagggagaccccaggcggctcattctaggcccaccagcttgctgggctgcggagaaggaaggcctgtgtggaggagggggcgtggggatccctcagtgcacccggcccagagtgcagcgtgcaggcccggctggctgaggtgtggccagggctgggctcccccaccccgtcttcctcctcccccaggcctgtggccccagtgtggcccgacgccgtccagcagtggggccaagagcgcgttatcagataataaataaggcggctggagccgtccgtgtcaacatcttggcggccgcacagggtactgtgggggagggggctgcccaccagggccacccccacctggggggaggctgtgggcttaggcagcctccgctgctgaggcgcctgtcggtggaggggtgaaggcgcgggcaccctggggtctatccccagccacaacctcgcagcctcgggggtgccgggcccctcaagcatcacttcttcatctcggcctcgtgtggaggcccaggcacggcccagaggcagacgtggaggggttgggcctgggtgcttgttccctgggcctcaccttccacctggtggctgagcacctggggggccacgtggagatggggccccagcctgcacaggtggggttgctgctgaggggatgctgcggccggcagtgctgggccagggacactggtgtgtcaagagccccactcagcctccctcagggaccccaccaagtacacaccaggcccttccccactgtgggccctccgaggaggaggctgggccccagggtgcccgagggtcacagtgccagctgctcctgccacggggagcctgggctggggtggacaccgggtactggccaacttccgaaggcaagtctgatgtccccagaaacacggcccctgaggctgtggatccggcctcgctctcaggtgagagcctggacttgaaggccgtcctgcctccctcccgccctgccctccccacctctctcctctctgctcactcggctgccctgccctccccacagcacaccaggccctgactcagcccacgtctgactggctgtccccgaaggctgtccacacaccctggaggaggcagcccggagcccacgaactgtgagcccaagcctgtgaggctgtggcaccagcatagctgggtaaagatgccacccgtgttcctggcggcagagtgacctgtttgacgatggtgacaataggaactgtttttttctgagggatgtccctatttggtcaaataaggaggcacttttcgtgaacagtgttccttttcttttctttttttttcgagacagagtcttgttctattacccaggctagagtgcagtggcgcagtcagccctcactgcagccttgaactcttagactcacgtgatcctcccacctcagactcctgagcagctgggactacaggcggacgccaccacacctggattatttatttatttacttatttatttattattattattttttgtagagacgggctctcactatgctgcccaggctggtctcgaactcctgggcttgagtgatcctcccacctcagactcctgagcagctgggactacaggtggacgccaccacacctggattatttacttatttatttatttatttatacttttttgtagagatgggctctcattatgctgcccgggctggtctcaaactcctgggctccagtgatcctcccacctcagactcctgagcagctgggaccacaggcggacgccaccacacctggattatttatttatttatttatacttttttgtagagatgggctctcattatgctgcccgggctggtctcaaactcctgggctcgagtgatcctcccatgttccctccttaatgagcacgttgcatgtttcagacaaaccttagaggcatcatggtcacttagccatgagctgtcttttgcaacagcaaaggagagactgaccctctccctgagcccacccctggaagctgcggtcccagcacagtggagatgtggtgtgtccccaggactcagatgcccggtcgggtttatgcctgtacagggcggctctcgggatccagtgtccgtgtttggccaagacacacctacgggtgtcaaggagcaccccgttggttggccgcagccaggtccaggaatggtgggagagtgaggacgtgccagcctccgggcctgctttgaggagtgagggctgcaggctcagggcctggggtgctttcagccttgctgctctgctctgaatgaagccataaattaagggcttgaagcgggagggctctataaatggttctgggtcaggaagccccagctgacggggctctgcgtctctcttctttttctatgctgcccatactgttttggggcttcaccagggccttctccctcccccagggtgcccaggaccgagcaccgagggtcttggtggacactttctgcaggctggaggggccgctgcaaggtctttggggatttccaggtgcggcgccctcctcctgaaggctgcctgggcatctgctttagttcaaaaggtgatgggaagtcagtatgcccaggtccaggcagtgcaggtaaagtgactttccttttagtcctgtcgctctgataaggggccgggccactttgcctgccaacctccggctcgtctggttgtttatggctggctgggcagagcgcagggagggctggtgggaaggagagtgcagggcgcctggcggctatattaaggctctggtcctcatggcttccgccctaagaggagaaaggcttaaatttagcagcagtgaccatgcccagaggtggagctgtcagcctccgtcatcccggacacatccctaaaaatggaataaaaacagggaaagggttgcttccccttttcccatgggcaaatccccctgttccctttggggacctcccttcatggatggggtgtgtccagggccacagtcgggtcagcacttggactccttccactctacctatggggaccctgcctgtcctgcacgacccccacaaacacctccaggaagcctctccaggtagggattggtgcctggtgccacctccctatactggggcctcctagggacccgccttctacacaagtgcatggattacagatatggccacggatttgtggcaccccctccccagcagaggtggggaaaccgaggccggaacggaagcaacgtggccagctccattgcacccagcactgtggtctggggacgccgtgctgtgccctctgaccctggcaccttgagtcacctctctgagccatggtttttctcatcagggaagaggaaaaccaacgcctgcttcctgggagcggggagtgcgaggatgaggctgcgcagtgtccacccagcagcaggcatggggaggcgctgatgtgaaaaccacgacgcagacagtcactggctgcctcctgctccaggtcctcagcccaggcagctctgcagcttcccgctttctcccccaggccgtcctcaggcctccttccttctgggtctgtggccccctcaccccctcacccagggtctggggtgctgacaacaggctgggctggccttaccttccatagagacgtggattcccaaggtcagcccttcaggtggtagaggcagcaaccgtccaacctgcggggggacagactgtccttccccagctgtggcctggcctggagaggcctgggaggtcactgccactggtgaggcctgggaggtcactgtcacccattttcccattcagggacccaacgcccagcatgagccctgaggcagatgtgcaggagctgggttgagggggcgaccctcagtcccttgtgcctcagtatcctcattgtgcacgggcacccgggaaggcagcctgaggcttctgggtttggaaacaggacagtagcaagtgatccccaatggtgcccggatgccacatgtgacccttatggggatacaggtgccaccttgccccagcccatttccccgtcccccatccccaggccagatgagcagggcagggcaggaacttgaactggattcggaccctgaagccatcatagtgcagggtttctcaaagtgtgggcccccaggcacccagcaggtttgaggggttcatgtttaaaatgctgactcccgtgcccacctcagatcccacggagctgaaaatctcccagcatggctcccactgcatgggctagaatgaggggccttgcctgagttctctcttgagacaggtccagtggggggcaggtggctgaggaagttactagagctgctcacagcccccaccccagtgcctaataggatgcaggaggttgggagcagacagggaaggcttccaggaggaggtgggcttggctaggaggaggttctgagcagggacccagcctgtgggaatggaggcgttcaccagcccagcccctctgctgcgcctctgggccaggccccaggcctgttgagtgccactgccgagcctcacacctgccctgcctggcacccctctctcagccgctggggacctgggggatgctggtggtcctgagcaccatcagggcctggagatgtccttgagggcacctggggggacgcaggggaccggggatgtttcagaacgcagaggatagccggaaatcgctaggagggtggtgaccagcaggcagggcaggacttggagaccccacgggtgatgggcagggggagatgggagaccccacgggtgatgggcggggggagatgggagcacccctgggtgatgggtagggggagatgggagacccccccgggtgatgggcagggggagatgggagaccccatgggtgatgggcgggggaagggagagtgagtgaggttcaaggctttatttcactttccctgtggcttcatttgtctcttttagaaaagatgacatcgcatagaagtggggctggaagaacctctggagggacagtttcagaatgaccggacccgctcctgaagctgatgccagacaactgtttttcaatatggggtggtgcactgggggtctagctggctcacaatgttaaaaatatttttgaatcaaattggaagacttaaaatccaggtttctggcattgctggaaaaatcagggcttgttgttgaagggcagcagccggacggaggcgaggatgtgctccccgcagggccctgtggctgcctgccccgctcctctgctccctgtggcctcctgacatacatcaccggccattcacagctgcgtcgggtagggtgcctctcgccagcgtcactcattaaggtatcatccaacccagtgtggagggggcttgcaagagaaagaggggtcactaacaattctcctgggacaagagactaaactgcgtggccccagatatgccaggacatgtgaccacgtcaccaccagccccaacagcgcttggatgggtcaggacagggctaccagacaattcattctgcctgtcagaaatggtcatgatacacagattcagctagaacaaggccctttcccatcccctctggaaaaactgtccaaacaagtgcgtaagtctgtgatgactgcaatgtgagcggcttcccctcggcggaatcctggcaccgtgcgcggcccgcactccgatccctggcagtcctgcacctgttgcgggaaaagttctctgcaccacagctccgtctatccatgtgggcaatgaaggacagccccgaggcctcaggaggcccatgtccagctgctcccctcattcctctcccctgcttggcctcaggtgcttcactgggaatcttggttttacactgggaggttgactgttttcccccaactgctacaacttgtaaacatattgacggtgagcattgatgacggaattcaagttggtggtggtggtgccctgcgttggcctccgccgcagggggccagtgtggtccggagccttgggccgcacctggggagtcccttgctgtacgtggggtgggaagctgagcccttccctcaccagccttcttgctctggggcccgactgccgtctgtccagaaggcctccccaccactgtgtggagactccagcagacccagtctctgggttggggggcctgctggtctctgctgtgctggagcaaagcaggcacggaggtgactcagtgggtggtctgttccaggctgttcccctgacatgggctggcctggggacctaggccaaggccagcgcacaccaggcctcttggcgcagagcccccctgaggccagcctgggggcttggggccgtggaggggaaggcaaagtcctcaggctcgaacttgaactccaagtggccgggggcaagagagtcatcctcctggccagaggcctgcagggacaggagagcgtgagaatgtggggtggggcgtggggcgtggggggctgggggaagctgcagcctcttaggtcaggagctcccatgaccggtatttgcccttagggaccccctgatgccctggaatggcatgggggaccccacgtgaggcactggggtttctcccacatctggcacagagccagctctaggggaagggccaccatactgatggccgaaggcagccggtgtgtccagcccacctgctggaagaggctccgaggggctctgatgggatctgacttggcggaggaagcacaggggccccagctctgggcaccccaccccagcccacccccttacctggggggccatgctgggcccagggcacactggggacgccaggctgggcttggctttcgaagtggctgctgagctgtcagtgctggcgacagcagatggggaggccgaggcattccttgtggatcctggaagcgaagagggggtgtttacagaggggtcaggtgtggcctcacttccccttcctgccatgtagcgggtctcctctggccccggcccagagaggtttggagactcctcacggtcacaccgcaggcgtgggtggtgtggccgggcgtggcttctttggccccacctctgcccctgctgcccacatgctgtcaccaccctggcaccccacaccccccccagcaaggtcaccacagggcagagctgggggcatttggacttccagaggactgtgcttgaaccaaacacacaggtctctcatgacggaactggaggcaccgaaggccactccgcaggagcggggctgactgcagggcctggccacgcacctgaggagcccctggccttggcgatggtctttggcttccgcttccgtgtctggatgctttccttcttcatagccagaggccgcggcacctggcaggggtggcgagggtggaggctggtcccatccctgctcaccccgggccccttgcacagcaccccctcattccagccccccagagccggtcactcctggagctggctgtgtcctcacagccctggtgggtcagctgccagctgggctgggtgagggggagcccgtggagctggattcccattcccccgtccgacagagctgccaggggccagaaggcaccaggggtgcccagagggcaggagcagtgtccttgtctggcccaggccgaatggctgtggtgagcctcagtcagcgcgtctgtgccgtgagtgtaacaggaatagcccgggcccccgggggtggtgccgcagtcggccggccgggacatgtgtgtacaacagcccaggggacaatagccatcctgcccgctcctccccagcctcttggtctgagagtgcggacggcgctcgctaggaggctggacagaggcctccccgccctgccccggggaccacactcaccccgtgcagcttcatgtagaggccgcaggcattgcacacgggctccccctccgagttccgccgccacagcgtggtgttggtcgtgtggcagttggtgcagcagaggccggcgcggcgggacgaggactgtgggggcgagggagactggagtgagccccgggccgggtgcgcggctggagcagggggacggaagcgagactcaggtcggccttgcggccacgcaggacccggtgagaaggtcgtgagctctgcaatggcctcgcctggcagctctgcctggacacgctctcgagccctgggaaaggtaactttaccttcctgggcctcagtttccccccaagtaaaaagggggtgataacagacccaccacaggccagttgtggggttcagagcccgtgggggccaggcacctagacacggcaacggtttccctattgtctctttatcaccaaccctgcgcctggaccccgcggttctgcagtgcagcagcactccaaggccacagggtcccccggaggccaagacacaacaagcgtcagggcctgtggtccccctggacacccgcctcccaggccggggggccccaccggacagaggctgagggctccgggtcccacctgcctatgtctccccattgctgtgcactgcgcctggtggtggagcaagactagacccatctggaaccttccagaggctccaacattgcctccctccttcccgtggctctcagtagagactgaccccaatctggcaggcccgggtccaatcagaggtcccaaacctccagggccccagtccgtgagctcagctggggctcaggaatctgaactgagggaggcctgggaggctctgagctggctgcctggggagtccctgttgaaggtggaccaggggcctcccaccagctcaagccagcctttctcccactggccgcacaagttggtgcttggagggaggtggtgtttgggagctcgggagctccagcccagggccccagaggcacctcagacttgaagccctttcccgaatctcagagcacagctctgctggtggcaccacccttcccagccacttgtccccagacctggttctcctggggggctgctgtttctacccccagcccctaccctgaccccatcggtccccttccctcaggttgcacagcccctgcctggtccaggtccccggcctctcttgccaggatcacagtggtggctctgcaggagctctctcctgccctcccggcggcagccagggccagaccatcagtgtgcctcaggcacaggacgcagcccatgagaatgggccccccacactcaaagccatgcccccagattctctagccaggacagagccagacagcaggcacaagtgagccagccacactaggggaaaagaatccatcctggacgagggctgagcagacacagccagcctcggcttccccgtctgtgtctgttacttacgtgagcagacacagccagcctcagttttcctgtctgttacagcccacctcggtttccccatctgttacagccctctatgaacagacacagccagcctcggcttccccgtctgttacagcctgcctcggtttccccatctgttacagccctctatgagcagacacagccagcctcggcttccccgtctgttacagcccgcctcggtttccccatctgttactgccatgagcagacacagccagcctcggcttccccgtctgttacagcctgcctcggtttccccatctgttacagccctctatgagcagacacagccagcctcggcttccccgtctgttacagcctgcctcggtttccccgtctgttactgccatgggcagaaacagccagcctcggtttccccatctgttatagcctgcctcggtttccccatctgttactgccctctatgatcagatgagggccggccttgctgaccatctcctgcctacccttcccccaggctgctgccaagggcacaggccgtcctgtcgaaggcctgagtgggagagtgggggcctccctgcagccctgagtaccagccagcccccaaactcaaggccccctcaacccccagccacagctgcaggcagttgccaaaggctctgggaacgctgcccctgcttcatctggggccaggcctcctgtctccaggcaggaccctgccctgagctccatgacaaaggggcagaaaggaaaggagggggccaggccaatgaggccggggaggcttgagaggtgcctcagcttgcagctcctggcctgactgcggaggacaatgtctcccaccctgggccaacagcatccagccactcagggtctccagtggtctctctagggggatgctgggggtgagacttctgctcacgctggagggcccagcccaggccccagcagagctgggagggagatggtgcctggccccggctggatggtgggcacccttcgtgcaggagcaattggggtcacccagggcccccagatggtgtctctccctgggatgccccctgccacaccctgatgggtctagaagcagctactgttactggacaggatttgagtttggtccagcctccctctcttctatcctcgtcaggtgccaggtgctgtggctgctttcttggtggcctcaggccactgtccagcatgaggcatggtctccttcccacctctcggacacccacccatccgtctgtcttcctgaagtggaaagaaatctcccccagggctgccagacggattgacccaggatgcctaggtaaatgtgaatttctgcctaggtaaatgtgaatttctgatacatgatgaatcctttgtctcctgcagtatttgggacatgaatgctaaaatatttgtgtttatctgaaatcacatggaaccgtgtgtggcctggagtttatttgctgactccctccttgtgccccagcagtccccgccttcagactgaggggcatccatggcccaaggcccatcctcttccctgaaccagagggaccctcgggtctgggaccggccatcaccccttagcacacacagataggggtgcacacacatgagcacactccacacgtccccgcacagctgccagcacgccccgacggagccacgtctgagacacgggttgtggaaagaaacaaggtggggcgcgcaggacgtgcgtgggttgggacagcccccagcagcgggcacacccctcaccccgcacccctgcgagtgccagggaaacacctggaacccaccttgaatgttttcacagtgagcatgtttcatgtctatcaaattaagacaatgggaaaaacatggacctcacaacacttttcaaagtgcgtcttcacctaccctttcctaaatcttcaccagatcgctattgtacgagtgggaggctgaggctcagaggagctgcgggaccagaggaaactggggaggcccggggtggacagaaccgcccccctcggccaggtacttaggggacacgctcccagcagcttgcccgcgctggggctccctgtgccaccataccgcgacgatgccttcatttgtcccctcctcactgcccaacaagcagcccagcctggccacactcagcaccctgccccccaggcctctctcccggctgcatttcgtttttcttttttgtcggttcttttcaaaagaagtcaaacttcaaagcctccttgcgcgcagcagagccgctctaagcaccaggctctgtgtgcatctgagacatccaaataaatcaggctctgggcagggcagggcccgggccggtgctggcggaaattcaaggaaggcgggagagggaaggaggttcgagcctggcttggagggatgaagcgcacacgccgggaaacactttggagtaaaggtgcaggtcacagtgacccgcagtgcagcagcctcctctgagatggaagactgggccgtggacaaccagaggctgctgtgccgcagagtctgagccttggggacgggtgagtggctggaatgtctccaaattcaaacaggtcccctcctggaggggggatgtagtaagcacttgatacagtgcccatgccccttgctggccgaggacaaactgacttggggacgtgggtctgtgaagggctcgaaggaaggaaaccctggggttgggtgggtgttaggtgcctgactccaggtaaggaccagtcttgctcagcgggaagggacgcttggctccatgcaacactgggctacttcctggagctggtgccagaggtggctcagggctaggaggtctgctgtccgcactgcccttggctgccgggccccaggcttcagccgaggcttcagtgttcttgggggtgggctgcttggggcccaagagctcccaaccgtgtccgagcacagagccagaccatggggagagggcacggtggtccctaccctccgaggcctctggtcttggcaagatggacagtaaacagggtcctcccccaggaggcaccccaaagcccaccctgtctaccccagaccagggaatggaggcctcatcacgccaagggcccccattagcccgtcctcagagccaaggcccaagcacacaacaccagctaatttaacttttacagcaaggtgtggacggttccaagttcctctccccacttctcagatgaggagacaaaggctcaaagagctggggaactgtctacgagatgccccagcccaggagtctgggatccaactggacacaggtattgcccggctggaagacccagggcagggcagggcagcaggaggggctccctcctagcagctcctcctgacaccagagtgtcccggtgctcagttcaaggcctggcagtggggagagtggatacagccagaggaggggcagccctttgcatgggtgagggtgaagggaggtctgggctgcagtctcacgggagctgggctgagctccctaccacttctcttttttaaaaaaaaatttaatttaacttaaaatgtaattaaattaaagagaagttaatttcaattacaatttttttttttttttttgtgatgaggtcttgctctgttgcccaggctggagtgcagtggtgccatctcggctcattgcagcctcagcctctcagctcaaaagatcctcctgcctcagcctctcaagtagctgggaccatgggtgtgtgccatcgtgactggctaacttttaaattttttgtagagacctggtctccctatgttgcccaagctggtttcgaactcctgggctcaagtgatcctcctgccttagcctcccaaagtgctgggattacaggcatgagccattgcacaggaccaatttatttatttttagagacagagtctccctctgttgcccaggctggagtgccttggtgtgatcatagcttactatacccttgaactcttgggctcaagtgatcatcctgcctcagcctcctgagtagctgggaccacaggtgtgtgctaccatgtctgactaatttcttttttttttttttttttaaatttttagtggagatgggttcttgctatgttgcccaggctggtctcgaactcctgagcttaagcaatcctcctgcttcagccttccaaaattctgggactataggtatgagccaccgtgcctggcccctaaccccttcttaacctcagtggttaacccctcagtgagggccacgtggacgccaggctggaacagcacacctgggagcacaggcagagtcacagcggcacacaagccaagagggggatggactcctaggagccttccctccgagaggcaggcatgggaggaggctgggcctgcagagccccaggccctaggccagctccaaggaagagaagtgacggccgcccccggcctgtggtcctgcttcccaccacctgctccactgggacctcccacgctcaggtcctggtcccccacagcccagggccccaggatttcccctcagcctgtaactgagggatgttcagagctgcaccggcatagcacgcgaatccaggcatctagaacagccacccggcaaggacagcggcaggagggctggcctccacccagggtgacggcgggagctggctgatcgaccccgcacggagtccacaccaccagcggaggaggacttggtgcccaggaacatacccttgctcagccttctgacccaggtgccactgtggcctccccaattttagataacttgcaaacgacatcaacaccccaaatccttatttgtacaattactcgaaagtaaaggtttgcctggggaaacgtatagaacaaagcaactttcagcctcttccagcctctggggactgtgccctgcctggggcaaaagtccaggctccggagtcccccactccctgctcagccacaagccaggaagaaccaaaagtgaaaacaagtttagcccatgaggcagaggacaggcataaacctggtgtccctgcggtccctgaaatatgggtagaaagtgctccccgaggggactacagacccaaagactctccagtttcagatttcaaggcccttcaatcaagtatccagcagccaccttccctcaagcctcatcccaggtagggtcaccttgaggcctccgagacagggccaggccacagccagccaccaccgactcgtagggctgagctcctggctcctggcagcaggccttcttggacccagcactcagctgagcctggctgacaccgttgctccagagcctgggctcctggcccccagagcgctccagggctgggcgctatgagctggtggcccctggcatccccactgggatcccctgccctgccctgagcgctctcaaagaagacctgagccggcctgacctgacccaccggggcgggcacccaggctgtttttgggacactccctaccccctaccccaggggctctggtgtcacctgggtggattgcaagaggtcccctcgggggagcactgcgcccaggcgcccctctgcccagcccgaactcaccaggcgcttctgaggccgaacgagcggccggttgacgccattcatcttgtggtagaggccgcaggcattgcacaggtagtggccggtgccgtctcggcgccacagcggtgtggacagggccccgcagttgacacactcacgaccctcacccgggaactcctccaagaagtcggacactgaggggacaggcagctggtgggcccgggccctcccctccccaggatcctccccagctcatgggccggcaccctcccctccccaggagcctggcggctttcgtcagacgaataaacttaaggcacaaatcttgtgccttagatgtattttattttaaaatttatttgcttacttcatcttatttttaaatttttaattcacatacgataaaattcgctagggttggtttttcgaggatggggtgttaataaacagaacctgaagacagacacctgggactcccggctccgggaccgggggccagcactggcctctgcctgtttgacctgctgggaaagcagggtgtctacactggcgggggaggtggatgaagtggtgtctacactggcaggggagggatgaaggggctttatctggcagacactcttgggcgcccctgggctctcctgggaacgctaaccccgctgtcctcctgttctgcaaagcgggtccatgacaggggtggggggttgggagggtggaggaggtgccttctgtcagcttggctgtggtcgcaaccagtgtccttcctttagaaggccagccccgcctcacagccccctggggccgggcttcgcacactgtgcggctgggggtggaggtcttcctggtcccctccaggcccggcccggcgccggcgcgagggaggcccgggcgccgagtgggggtggggcagggatcaatcatcgccccgccgggggtgggcgccagcagccgggctgtccagggaggcgggggccaggggtcctgcggatgccgctgcgcccgcttcctgcgccaaagggccggcggggtcccaaaggcagctccggagctgggtgtcgaggcctccaaggtcccggagggacgggatgggcccctgcggagctcagaggagccgccttcgccagaaagtgactacgctgcaaccgggaagagccgctcccctcacaggccgagaatccgattctccaaactgatactcgggaagcgactgaaaccaggtctcaaattaaaatcagtaaacgtcctagaaccgagacgaatgtggccacttaaataaaccgatgttttgggctttataaaaatcgtttccaaaacttttcaaaaacaaaaacaaaaacgattaagacttttgaggctccacattggcacaatccggaatgctgtttggaaatagatgttccttctcattaacaggttaaaacagaattctggatgggtgtttcccgtgcggggtgttacccaggtttactcgtctcgccccggggctgctggtgtcgctcctggcagggaggctcggaccgtgggggaggatgaggggagcgtttcgcagggtgcgggtttgcacccggattcggccgctcctgggccccgagactgtggagcccccgcactcaccgaaggtgggcctgcggcctgggaggccgtgcaggacgctgccatcgaagggcccggcagtccaggactgggccacgtcggggctcacgtaggccgggtaggtggcggagtacgaggtccccaccggccgcccaagcggggccgcgaactgttctcgaggcaacagcgcgccctggtaggcactgccgtctcggccccccgcgctgccgccgctgccgggccccgaggggctgtgcgcgaaagggaaggcggtggccccgggcgggtgcgcggctggggggtgcggactgcccgggccgaaggccgacgaatccgcggtggctgtctgcgcccagccggggcgcgcagcgagctcggggggctgcgggctcggctcacacccggacaggtaggacagcatcgaggggacgcgcgccggcggcacaaacatcggagagccggcgcccggagcgtgcaggaaggagcccgagtcggcgtaggcggcctggcgggggctcgcggccagcgccaggctctggtacatcctcccaggcgtggtcttgacctgcagggaagagggacaggtgtggaggtcacgggagctctgcgccctccgccagcgcccgagcttatgccgggcaggtgccgccgcttcgggcagcgcttcccagtccccagcccgggacgttcgcggggcgggtccccgaacccgagggagaggaaccgcggggatgggagaggccagcgcgtcatccccggggcagtcacaacgccgagcccacctcctccccgaccgggcttcggaggtccccggggtgagctcggtgggggcctgggaaggacgggcctggcgcggccgcaggacgcagggcctggagagcggggccccgccgcgctgggaggggccgggtggggaggggcgcgcggctgcagcccgggctggagcactcaccagcgggcagggagggcggcagggcacggcggtggcggtgggtcggcgaccggcgggccgaagactggaagcccgggccgctgaggctccgcagccccctccgcgccgccccggcccgcccccgccgcgccgccccttccctccccgcgcccgccccttcttccccgcagggtcagcgctggggctccggccgtagagccacgtgaccctggcaggccctgctcgcggggcttggcgacaaggacgcacgacacggggcggccagcgcggagcccggaccagtgcagctagacgggcgggccgagggcttcgtgggccccggggagtcgggcgcagagacttctccaagtttgtgcgagtcccgagccctctgcctccctgccccggcccccgccgaaggctggcctaaagacgggctccgtgtctggtggctgagtcggtgatcccggccccgctcaccgatggacacgcggcggtggaaccccgtgggccccctcgttgcgtggccgcacccggggctcggtgcagggaaccggcttccatagggacggccggctcgggtcgctggactgggacggggtgcactggcgggagccccgcgatttcctcggtttctgagcaagcggggccacaaggctcggggtcccagtgggaggtgggcagggtccagcctctaaggcccgatctgggtgccaggctcgaaggccccaaccccggtggggctctcagccggctctcggggactcgggaagagtttcctccaggcgccagaaatgcgtgtgggtaggaggcgacccaggtcagggaaccgtgtcccgctcgcactcccggtgagggctgcatggaggcgccgctgccgcggagcagctccgcaggttgcgggaaacggaacggcgggctcggagcacaccgggtggacccaggcttggcggccatgaaagttctttttttctttttttctttctttctttctttctttctttctttctttctttctttctttctttctttctttcttttctttctttctttcttttttctttctcggagcacaccgggtggacccaggcttggcggccatgaaagttcttttttctttcttccttcctttctttctttctttctttctttccttccttccttccttccttccttccttccttccttccttctttctttctttctttctttctttctttctttctttcttttctttctttctttctttctttctttctcggagcacaccgggtggacccaggcgtggtggccatgaaagttcttttttctttcttccttccttccttccttccttccttccttcctttctttctttctttctttctttctttctttctttctttctttctttctttcctccctccctccctccctccctccctccctcccttccttccttttgcggagtctcgctctgtctcccaggctggagtgcagcggcgcgatctcagctcaccgcctcccaggttcaagcgattctcctgcctcagcttcctgagtagctaggactacaggcacccgccaccacacccggctaatttttgtatttttagtagagacggggtttcaccatgttggtcaggctggtctcatcgagctcctgacctcagatgatccgcccgcctcagcctcccaaagtgctgggattacaggcgggagccaccgcatgaaagttcttccttgcagaaacgggccctcaactcctgtcagtcagggctcggagaggacgctggtgaagggtgaagacctgggaaggcaggaaggcggcgatgtggggccgtcggggtgggtgtcactggatcccccccacgggggtctggacagccggcgctgtccgtctgggaagagctggggtgccccacatgcgcccttattcctggcctttcctcttcgcccacagcagataaggattcagggtgcttgtggaggcgtccagggtccctgcgtctgggaaggcagcaggctgaagcccctggtctgtggtggacttgggaccccacagacggttccgcagcaggttcaggcctgtgcaggagagggtgcagcgcggcaggctggggtgggggtcggctgccattggggtagggagctaggcgaccttccgttacccctttaccagctcccagcccctcctcgccagcttcccaccagatgctccctcctttcctgtcctcagaagcctggttgctgcttgccctgtgtggactcccctgccttctgctctcccggcactctgggtctccgcgagggtctctctttgaccccacacgtgcagactttgtctgtggatggcagtgcactccacgaaggggtggagaggtgccggggcctcggtgcgggcgagagggcgcagtgcagtccaagcggctgcagagggctctagcgcagcaaagctggttggacccaagctctgacccctctgccctcaaagcccgggttaccgagccctcatgagcaccaagaacgaagagaagtaaaaagggacacttgtgacctgctgggggctgagccaccgctaaccccaagaaaagtctagagaacaagaaaagaaccacagcaaacctgggaccctgcaggacgaatcggggagggattcgtgctttttacttgcaataaaatctgtaaagttcttgaataggaaacaccaacattgcccgggtgctgtgctttgtcctgacatttccatttagtcctcacatcagtcttatgcaacagatcacattatcattcctatatacagatggagaaatggagcgcagagaggtgagctaacctgccccaggccacacagctagcaattaaacaagccaattaaaacaaagaagggagtctctgagtgatagtggttggttgctttcttgagttaataaatatctacaatggacatttgtattaaaccctgggcctccatgaagggcggggaagggaaaatttacccttcgaaggctcctccgaggcggcgccccacacaaggcaggacagggctgggggtccggggctgttctggtcacttggtgccctgctaggcgagtcacaagctcacctgctctgcagcagcagcagaagccactggtggcgtgttttccacgtggatccagctgcctccacagtgactggtgggggtgggcacccatccgtgggggttgtctgtgacagtatctggaccccctctcagacctgtttctacttgagccaaaaagtgaggagtctcggctcaaacctcaaaacccaggtgcccccgacgtcctcgatccccacgaaccatgcttccgtgcagctctccactcccggtgctctgggcccctcaggaaggaggtggcccctgagccaggtgacccagtccaccaggctaccccacccagcagcaagccctcttctcccctggaccccgcccatgctgcttcctgaatgggccctttgccctcttctcttcttgccaaactcctacacatccttcaaggcccgtcttgcaggtcccttcctgtcccttcccctacgttgctctccccttcctggtgcctcattgtgcggtgtggtcagatggctgtgtgcctccgtcttgtcaccttagcagaagctgagtcaggagaacagcttcaggaacagcgggtcagggcatcgagcgggcacagtcagaactttgggactcagcgttggcatctccgggctgtgtggccttgggtgagctgcttcttctgtaaggtgggggtgatgatagtgcctgcctctcacggtggctttggggaggcattagtgggactgggtactaagggcgtctgacccgggatgggcatgcagcaggcattgggctaatgctgtctgagataaaacccagtgcagggatggaggctctgagctgtgtgcccagggccctgagagccggggagccaggggaagtgacaaagaccaggaaggaatttctggccctgccatgggtgacccctctctcctgaaggcttccctggttcactgggacccagggacctgccatggctggcctgggaagacacacctctaaggcggggaccccacccccagtgagataagagggtgggcatgttaaccccctggtgaccatacagagttaagttccatgagtcctgggctgtgaggggcttctgggggcctgagtggcctggggtgcggctgggctgagagggggcaggtgttggggggtggctggggtgagagggggcaggtgttggggggtggctggggtgagagggggcaggtgtttgggtggggctggggtgagagggggcaggtgttgggggggctggcattggggttgggggaggaaggctcaaaccatcaggctctgggtttcgtttcctgctgtcattttcctagcagtgcccacataacccccatcctgcccgcccccagcttgggaacccttaactcagacatacttatcaagggaaagaaaacagtctcattgttcaggaggataaggaccagctcccaggagacgcctcagacacggcccctgtgggtggagtcctgggtacatggcctcccccaggggccttgttctctgcccaggaacggccccagggagggcccttcccagaagcagtcctgggcagggcccccttgaggagcagccctggcaggtgggtcctcgccttgtacgctgcctgcaggtgctggatgctccacatgtgggcaccggggatggtcccacttgaggctttgagctccggcgaggccaccctctgtccagccagggggagggtgcctctgagaagggggctgtcagagttgcctgaggagggggctgggatgacccctatcaatcccagtcctggggttccttggctcttgtccctccctgcaagtggggaggccatgagaagttgtggggaaaggccccagagaccccagggcagggaaggaggcctgggggctgtgctggggcctggaagggggaggccttgtgctgctccctgtggtctgacgggcaggaggttagagggaggggcaggcctgcttccagcagggtggtcagtgcagggcagtcagcgcagggcggaggtctgttttctccttggttatttcaggtaaaccgcatgccccgggcccccagagtgggagaaaagccagttcatggccctctccccaccttcagcactgcccctccccccagtctccaccctggcagggctgtggggcccggggcatcagctgagcccactgggcccacagcaccctcaggacctcgccaccccttgggacccacagggtagcattccagggcttctcctacacagggggctccattcgcccgaaggccaaggactgcagagctcatcaatggtgaggggggcccgggaggtgggtgccttgggggtggtcccaactgggtggggttggggagcctgggggcaccatacgggtataagaattcattttggacacagtgtgtgtccccttctgcggaacctttgagctcaatagcccaagggcaggccaggctcaccgcccctttggctgttgccactctgggtcagtctccaggggcaaggacaggttggcagtgtcccccctctgcctgactccagtctgggcatttctggagcatcctgtgcgcctggctcagcccagcaagctgacatttgaaagctcacagctgtcctgtgaggtgggtgattcccgtgtcgtttcatggtgaagaagccaaggccaggacagaagtgacctgtccccgggccacagctgggcaggggcggagttggcatttgaacccagctgcgtgcctcttgagtgctgctctgtgggccccgcagcctcctgtcagctccttctggcgcctgctctgtgggtgttccttttgtctaaggcgcctgcagccctcagagggtctgtggggtggggacagagctcagcaccccgcatccaccagcaccatctccgacctctgtgcaggcttcgtgttagaggtggcagccaggtcctgccaacggaagatgctgggccttggaaacagcctgcactgtaggtgacccggccggccgggcccaaactggctgccaagaaaagggagcgggaaaggaaaacagctctcggccacatcgcctgtgtaaccgaatctgttttcaaagcccctcgcaacgcgggctccgcattcggcagggcaggcactcgccgccagatccccgaggactgctcagggggtcttctgggaggagctcaaagcgagtttgttttcggggaggaggtcattgcactcaaggtccccgtgactgcagcgttctcaaacgtcctgccatgtgctgggataaccccacccaccgcaggcgtgccctccgtggggcagggaggggaagcaggtttgggctgttagggctgcaagccaaggggcctgcagggcatcttagtgagctgctttggtgtccctgcagttggcgacacccattgtcacaccccctcggcaccctcggtctcccacatgacagacttacctggggatgcaaacagggctggtgatgaccttggccctgtgcggtggggtggccgtttatgatggggcctgcactcaactcactttcaggtctagatgcggggaccgggggaggtgtcagctgggctgggctgggcacgactagactgtggccccgtctgcgggagcccggccaccacctcagcaacgccacctccttaggatgtgggggcgggatttactctcgagactcttagagccagcgggtggctggaggctcatagcctggcccaggcagctgggggagggctttgctggtgcctgggaccccccaccccctgcattctcgcctttgctttctcttttgctctcgtctttaacaacatctctccactcctcccctccctccctcctctggcctgcccgctccttcattccttctctgctcctaacccccgcatagaggagcctggggagcccgcagcctcctgaccccatgttcctctttctctcctgtcttcctggagacgtctgccactgacagtcttggagccctgtcaaggggacctgtcctgcgctgggctgtccacagaggagcagcgtggaggagctgggagtgcccagcctgcctgtgggctgcattgccgcttcctgcccaggagccctgcagccgtctgtccgcctctgagtaggacagtggggtttcctggccaggagcagagtttgtcacattccagttatgtctgcccaatgttcagcttttggtgagtgtcaaagagtcagccccactctgcgggcgggaggggacctgagatgtgaatccaggggagttaaaaggcttcggaaagcatccaaaagtatagagaaaaaaaggatagttgaggggctgggacgatgcaagccttttattttcatcctttaactttttttgcatttctgtattttccaccatgaacaaagctcattgataatagagactgaaatatttcatggatgattcaaagagataatctgaaaagggaaataacgtttttctagggtctggctgaagctgccctgcggattatgcaaaaacctgtctgagggagtgagaacgcagaggcaccttagagccagccatggctccaagctctgaggatctgcaacagacacacattggctgggcctgagcaaagagggaaagccactctccttcagcaacgaaggagtggggatagcaagggctgagcttgtacatgcacacctgtgtgcagccacacacatacacctgtgcacacacatgcatatgctcatatatgtgcacacatgcaggcccgtgctcacatgcatgcatacctctgtgcccccacacttaatgcacatacatgtgcacatgcacacctacacacattcctatgcacccacccagtgctcatgacaaacctgtgtgtacttacgtgtgtacatccagatgcacccacacactcgcacacatgcctctacgtgtacgcccatgggcacgtgtgctcacagaggcctggaaggtgctgtttttccacgcgacgatggctgccgtgctcggtgggagcagccgcgttgctgcctgttcccgtgccccagtctggccgtcactcctcaccctcgtcaggctcagggtgggagggtgagtagcctggagtggcctggtcacgtaggtgggcagccagctggggcactgacctccagatgggccacgagagcccttcctgcatcttctgagtccctgactcagtgcccagtgagggtcccggagggcaaaagaatgtctaacgctccacctgtgggcgggtctggccttacggaaacttctccatggcaggtggaggcctggttgagtggagcaaagggcaggcattcccagtgatcaggagctggggccaggcctactgacaccttgatgctgaggggccagagcggtcctgagcgatgtcccgaaggcccagggtctgggcaggtggaggcagatggaccaagcagggcctttgtgttccagggcactttgcaggcagcaggacccccaggtcctctggagagggtggctggagacccggcctgaagctgctgcccccaacaccacaggatacctgcctgcaggtgccatccattgcttgggggctgcacagagcagttttgagcaggcagtggggtgtcaccttggagtggctgtgagatgtgcgggacccttgggggccacctggggtcaagcccagccctgcctcttgggctctgggaccctgggggagccactccgtgctctgtgcctaggtctgtgaccctggaggagggcggtgctgtccatctccggggacgatggttgcatctcaagggtaagggccccaggcctgccaggtgcttcgagtacagtccaggggcggcctctcggggctgctctggtgggcggccagaccctgctggaatgtgactctgttcctgggatcaggacctgccctgttgcttgtgggcagggttgcctttgtcaggtcctgccatttctgagcctcagtttcccaatctgtggtggggttgacgtgaggaaatgagaaatgcacccagggagcactggctggcgctgcagggcagcaagggggagccaccatggtcactcttggaaaagtccccagccctgcaccagcagggcagtaagaaagtccacggctgccgctgtcctggagagaggcagcagcccgggagaggcagcagccctggccacacccctgccaagagccagctcaggggcccagggccgctgagatcactgggcagttcccaggctggctgggctgtcccctcgtcaggagggcagggctggcaggtttgtggacgccttcccaggctgacccccacaatagccgccctgctccaccctgaatctacccgtcccaggctgcgcctgcctccaagtgcctgattggagatggccaagcccattcctcatgtacaaagaatttcccgagcagccacagctgctgcagctggaacttgtctccagatgggtcgttccgagggaaaccagcgtctcctgtctcctcctgcagacatgggctggcgtccgagccctggatcccctgccctggcttggcttcctctggaggggagataaggggctcctgacatcttgtaggctgaagaacccgcccagcacgctgacagggaggcgccagaggcagccgcagaccggcctcagcccctgcagcccctcccctcttgttgttgcagaaagaagccctcagggcccaaggtcgacccacccagccaggggactgctctgtagctgtggcccactccagccaacccgggagtgaggggctccgaagcgtgcccagcacatagggagggctcattccggggggcaccgtctcccagtcagagcaggctggagctgggcacagccgaggaagagcaaacgtgttctgtccttgactccttctccaagtttgtgatggcatctgccatgggccagacaggggcacacgagagtgagcgagtggacgtggctgccctctggagccttccagggcgcgatggcaggtgtggagaggcacacagggaaaccctggagtctcgccgaggtacaaggcgatgcagaaagggccagggagttcccagagactgtcaggggctccctgggcggaggcagagacccccacctggcccctggcacctccagcaccatgggcgccctggctagggatcccttcctgtctgaggtcagcgctgcaaacctgtggctgcggttaccccaccatgttttttaaaattggaacaattcatgtaaaagcccagattcattttttcttgaaaaaaattgacagccaactgtgaccacagtgggcttgtttctacgcattgggggctcttccctcggaacaggcagtgctctcagttgccgtagacgccccccactccctgtcatctcacccggtccctgctgggcctctttgtggcccatcccctggttcagatatttcattcaaagacccacccccccagggggaggccatccttctcaggaaggtcgcttggcctggactcggaactggacactcattactggtcaccctgtgactggagcaggactttgcctttctgcacctcggtttctccatcctaagaggggctaacgcctgtgtcgtgggactgtcccgaggcgctcagaagcagtaggcttgctcatgcttaagcacagagctcacagctgggggtggcccctgtgccacaggtccctgtgtgtgcccaactcccgctgcagagggcaacgctgtgtgtgcccatgtctgtgctgtggatgcaatgtgtaaactgcacagcctttgacggtggctgcctgggttggaacgcgggcctctatgtgtgctctccaacggcctgtggcggaagggcagcccctcccttggtgggggaagttctccatagctttggtgcttgggaggtttggagatggcttagagagccatcgggatgtgaggggatacatttatctctgtcttcttggggacagacctcggaggtccctctttcacccttaaaggcctggatgaatggaatccgtggggcaggattctcaaagcaagactggtggggcctcacaggcattcctggaaaagggctgtggagttaaaaacccaagcgggaaataaacagaactaggcttaggaagggtctctctgggaggcctgtctgccctccatctttcgtgggctcaggagcactgcctggggctgggagcgagagctcggatactttacgttctctgaggcgctgaccgtggctctgcgaggaggagtgttcctccggacagacatctttcagcggcgctggactaagccatgggacaggtctgactgtggctctgcgctccccgccgccccatctgttgccccctccccactgagagctgggggagggacgggatctttgtgagctgacttggggtctcagagccgcggggagggaggagtggggctctccctgcgcgggttccttttctgggtgaggcggagcctgttcaccaggcagatcgggggctccccggcctccacagatctcctggtgtctccccccaggctgttcacactttctttacttggggggctgataagtcacgcagctggcagcatttgcacctgattcaaggaggtgaacattttccctggagattagccttgaagtcagggctggtccccacccggggacgaggagaggacagaaggctacagagggctgcaccgggggagggtagatggggcgttcacccacccctgctgccgcattttcctttgttggttttgcccgaggtctgataagcaccctgctccagccagaggccttatctggccgcctaatcccctggccttggctggagaacaccagggctttgcccagtccgccctccctaccccctccctggcccctgcaggccgttggggctgggggtggagggagagggaggtggagtgaatacccccttcctcttgctctttctcttccaacagggcaaggggtgccggtggttgaagaggcccctctgggcaggaacctctcacctggggcacgggtgagtgggagccatcctccactgcccacctcccagctgtggccctgagctgcactggccctgtggccacagaccagttgaccaggaagccctgggaatcagtaggaaatgagtttgagacccggtccttcaccttaggaaatgagtttgagacccggtcctccacattaggaaatgagtttgagaccgggtcctccacacaggcatctgtgcacatacactcaggctcagcaggagtttgagaccaggtcctccacacaggtttctgggcacatagactcaggcttggcaggaggccctcctggtgcaagttccagcccttccttcattttgtgtctggagcaagtgagcaccccatgtgcccagagttctcatccaagaagtgggttgatgagcccagcctcgcagggagctgggaggtgggaagagctcaccctggtctggcttgtggtccttacaatgatggcatcattgtcatcatcatcatcatcatcctcctccttgtcaaccacttagagctcatgaagacagctccctccatcatgccctgttttatagctgaaaccaaagaattcaagctccataaggaagaacctagaggccccccacgtcagcctgccccagcctggagcttacccaccatggaaatgtgtctgttggccttacagaggagaaggcatttgggcagggctttgaggtatgagtaggagtttgctgaatgaaatgagaggaaagggttttcagggcagagggaacaggttggggtggtaagaagggtcctgaggcccatagagagtgactgctatgagtgagtggttggaactggcgtgactgaagatggggaaggacatctgggggtcgggggtgccagaggagttggggatttatctggaagatggtgggtgctaaggcaagaagaaccaattcctttttctttttgccaaagcaaagccctccataggatttccttttggactttctttttgaaagagtaatgcacactgacagtaaccatttagataatacagtttctaaaagaaaagcaatgatcctttgcctctcccacacccaccttttccccacaagcccccagaaggctgggggtctgctctccctcccttgacagctgcaggatgttttgtggtggggtgtgaggggctttggccagtccctggagatggacgtgctggtgtgtccagtttccccagcccacttaaatgggtgcagtgagtggcctttataagttccccgaagggggcgtgtgggggacagttacagacatgtcgtttaacaaatgctgcagatccccttccagaagtgaagaacatctcagccgtgccctggcaggcctggctcctccccctccacacctgaagtttctgtttaaaatgtttggccactggaggggtgaagacactcacctgtgcctgaggcactttattatcctgactgagcgcgccctgcacctctcactgtcctgaagtggctcggccctcgggcttcatctgggccttctgtacctgagcctgggcttggcccagcgtggccagtgggctccgggcccctcctgccagcctagcacttctgagacagaagcctggcgcagcaggcaggcacctctggactttgagcctgggcccttgacagccagggagagggcgacccccagcacacactaccctaacctttagcaacgtccccactgcagatgggggtgctagccttgaaagttgggtgccccaagggttggggcaggagggcaaggggccgccccagggaggtggtgcatgacacagcctataacaggcagtgactcactgctcatccagccataaagtcagggtgataggctcagtgtcccagccgtgctccctggagtccctgccccaacgtcattcccttctctgcagcctgcgctgggcagagctccctccccaggggggccgcctgggccactctgggaccatccacccattccagacccacccattccaactcacttgctactgctggggagactgagtgccagggagggggagcaagggtagatggagaactaacagtgtcagagtccacaggtcatctgtcccccactttacagtgtggactgcgggaggggatcccagtgtgggctgcagagctcagggccaggatgctcggcctgtccaggctgcgatctggaggaagcgggtactctctgcttagcccagggccttccacgctcctgggggctgcggggacagatccaagaacatgggccctggggccatggtgtccgattcaacccacgcttcctccctgttgacaccgggcaacttgctgagccgctccgtgcctcagtttcctcgtctgtaaagtgggattcatagtagctccttcccgactgggctgtctggggattggtgagtgatgccgtggggcaggatcatgatttacggggtgcctgtatgttctcccagagacgggaagggccctgaggggtgactcctcaccagatagcggggtctcccagggactaagcaggtgggagggatgggcgctgccctactgtgcagagccttggcgggatcccttgacgctgtccccaggctctgcggggccaggaatagggccactgggcctggggtccttgtagttcaagggtcaccctgaactgcggggctctaactatagagaccctggggcagtgacgcctgtgcaacctgcccgcctgtcactccctcccccaacccctcacacttgccctgcctccttgacctgccctgcccacccctcaccctcaccctcacgctgcccccttatcccgcccctggcacctgccctgcccttcccctcctgtgatggttaatactgagtgtcaacttgattggactgaaggatgcaaagtatcgatcctgggtgtgtctgtgagtgtgttgccaaagaagattaacatttgagtcagtggctgggaaaggcagacccatccttaatctgggtgggcaccatctaatcagctgccagctctgctagaatataaagcaggcagaaaaacgtgaaaaggctagactggcctagcctcccagcctacagctttctctgtgctggatgcttcctgccctcgaacattggactccaagttcttcagctttggggctcagactggctcttcttgctcctcagcctgcagacggcctattatgagaccttgtgatcacatgagttaatactccttaataaagccgcctttatatatacatctgtcctgtgagttctgtccctctagagaaccctgacgaatacaacgcccctcaccctcacactggccctgtcccccttgctcctgctgtgcccagcgcccctgcctgttccttcccatgccacagggagctctggacacagagtgatcacagaaactggcccattccaacctttttgtcacctctggggaaactgagtcctgaggtggggggagcagcgtagcctggagagctgtgtgactctgaacccccaccccagaggaaggctggaaggaatgcctgcgtgcaggtgcagtgcccaggacagtggccccagagagctctggaggaggggatgcccagccagtgagaagacgtgtgtcttgaaactccagatgggttttagggcctgcggctggtaagcaacctcctctctgtgcctgctccccacttcagctgtgagcccgactcccaccctcacactactctgctcttctgaagggtatgacctggggacccaccgcctgcacttacgctcctgtctccctccctctctccttcctctctgcctacctggagccaactttgagcctctaatctgtgccaggcgtcctcactgcccccttttctatttgcaggcccttctcttgcaggaaggccccctgaaccctcacccacccaccccacccccaccaggctcccaggggagcctctccctggccctgccaggtgcccactgtgcccctgctgtggtgtggatggggattctttcccagtgtgacatggcgggggggatctagaggagcttcccaagggaaatgggcttctgtgctgtgcttcagaggctgagtaggagttttcctggaaaaggcacagcagtagcggaggcctggaggcctgcagggagagtggccactgtgcggggcgggcctccaccctgatggcctcactgctccagcctctgttctttcttccccaaagtgccaagtttctttctctcgtggcacaggggttcctgcagccctggaatctatctgtcatttctgcagatggaggagatggcccctctcccaagcccctcctgctgtaggtggaggcctgagtcttctgaggttccctgcagctctccgggacccaggacttgagtggtggggttagcaggatgcgtccacagttgtggtggtgacagggaggccctccaggtatggacctcgtggtgggctgggtgctgcagacggatggggcagagacctgcagagaagcccctgtccccgggcttatgggcggggaaagaataaacatggaaagaaggatagatggctaggagggcacggcagaaacagcagagcctcagggctgacatttgaggggtgatcagggaggcctcccagagaaggtgacacgggtgctgaggacagatgatgagggcccagagctccagcacagcccaagcccagctgctgcacagtagccactcacgcctgaggccgggatggaggcggtggggaggagggagctgctgatcacagggccacagggcttcctgggccaggccagctgtgggtgagggtctcttctcccagcgcagcaggccccccgagcaggggaactggtgagacataagacctctaggggccgcagctgcaagagaggcctggagcacgggggccgtgcaacactggggggtgctgagcccctcctgtttgggcaggacagttgtggggggcctggcatggggctcccgcccagtggagcatctggctcctggggagaggctgcctcgcagggcctgatgtgactcccaaaccccacagcccctggggcctgcagagtgggatggcggacagctcttgccagcctcgctggaacccccagagccccccactttctctaggcacagccaagcttccgaaggcccagccagccctgcctcccgccggctccctggagctgctcctcctgttcccttctcgttggggtttcttgtgccgttgccaagggtgtcctgggcagccccctcatacctgcagcagctgtgccaggcccgctcagcaccccctccaggcagtctctctgcctgccctggaacctcagtggagacccagctcccagggccctggagaccacctccccaaggcccgggcagtgccttcttgtgtccatacacagcaggtgcccagtggctgtggcatcagatagggatctctgccccgggcacacacgccaggaccctgggagggaaatcagaggaatccagagctctggaaacaaagccaggagtgggtggggagatagaacatgccagggaaggtcggggaccagagagctggctgccagggactcccatgccacgtgggtgcgtggggcgaggctggcataggctcagctcaaggactgactctggagcttcccaggcagggctggcctcgggggcccgtgaccttgaccccaggtgaccccacgctggtgtcatgctctgctttctgggcaggctgctttaggtggtgaggcccccagccctggaggggtcccagcagcgctgtgcagggaagagggcagggaggtgtggggggggcggtgtcttgcttggacccagcagggtgagggtggaccagattccccgggtggcctcggcaggtggaaggcagggacctccatgcatggactgagtgcctctgcgcagggcctctgtggaaccttccagaagccccggctgtgttagtcaccaggctcctttgacaaatcaccgcgcactcagggccctcaagcacaccagttcctcagggtacacttctgggggtcagaagttctaagtgaaccttaagggactaaagtcaaagctgctctctctggaggccctgggggaggattcttcctgctcctgcagccgctggggcctccggccgctcccgggcttgaggctgcgtcgctccagtccctgcctgcgtctccatggggcctcttcttcctctgtctgtgtcaaatctccctctgcctgtctcttataaggactcctgtggtctcatgtaggcccccctggataatttggggtcatctctccatctcaaagtccttaaccatctctgcaaagtcctttttgccacctcaggggacatactgaaaggtcctaggattaggatgtggacgccttggggagctgttattctggatgtggacatcttggggagctgctattctgtctcccacggaggcgatattatcatcaccacccactttacagatgagaaccaggaggccacagacaggccacggtacttgctcaggcgtcccccagcggggagtgatgggtttgggatctgagcccaggacatcctgaaaccaaagctcctcaaccccatcagaccagggcagagttgatgaggccacgagacctctgctggagacccaaagaggggaaactgaggctcagggaaggcaggtaacctaaggttgtgagcttgccagggtcagtgcaagggtgggagcccaggccttgagctcacccccccaagtgtgtgaaatggtcgctcctgtcttcccccactgtgccttctcaaggtgaaatcctgcctcacacagtccccgcccccatcccaagactatttttagggccgggctacagatacaggaagttggcaggggtcgtttgcgacaggagtttactgagggctcctgtcccctgtgagtgctgttcagatggagatttaaaatggttagacctcgacctgggccctgggacaggacacacagcacccctgacagaggccctgggaagtctgcagagcctcagataccggcctcctgggtgcaggaatgctgggggcgctggtgggttgcagttggaaccaacaggttgacatgagcatcacagacaggaaaaccgagtacacaccaggtctctagcaggagggccctgccccgggacgctggcgctggccttgggtgcagatcgagcgccaggatggggcctgacactcaattcttctcctttgaggctcagggagatgtcagttggcttgaaaaaccgccagactaaatatagctgtgaaacttcccggaacacattattccaagtgtccagtaattaatgctcaacaacacacagtgtcttccagaaagccgaatccactctgaatgtcttgtggggtgggcggggggtcgtcaccgggaggaggcatgtggggtccctgatggacgtgcagggcagacagatggatgcgggcgagcacgtccttggccccctgaagtgccaagactggctgaggttggcaccctcctgttggatcaggccgtcctcaggaggctgtgggcggacgggagctcaggccgcagggaagccgtggcctctttctgctgtggggcaatcactgcctcctgcaggaagctctccttgcctgccctggcctcgaggggccctcaccccacccagtctgtctggtgaaggccccttcccatcttcccaagcagattagcccaccaaggccaggcctcgtccacctccctcaccacctgccacagagggaggtttgctgagcacgtgtgggtgacagacggaggcttctggagggaggggtacagacagaggttccctaggctctggcccctgtggcctccctgctcctcccagccccggcccgggctcccggcacctcccgtggagctggcggcccctggactcacctggcacccaggaaggtgattactccaaaggctcccagaaggccatttaccttccccaggctgttttctcacaggtgggggtgaggctgcccacagctcagctcagtttgcagaggagaaagaaacagccccagcccctggctgctggcgtctcccggctgctcctgagtctggcccttcaggcctcgtgcccgctcctcctcccgcccactcccccttgtagggagggccgggtgacccgtgtgtctccacctggccccgtcccatgggtcagcagtggcgatttccatgcagagggctgggtgtgtggacacaggtggggtcaagcgcagggccagtggcctcagcacatccgcagggctttcccggctttctgggagctggcctgcctctgtcatctgggctctcaagcggtgcctggatggtggtctcgcagaggtgcaggggggtcagggaggctgcctggggagtggaggactgggcttgtggggcctcggctgagtggcgtatttccatccccgcagggccagaaccagggagatcctggtccgccctccctgtctgagcagccacacgcagggcctgtgcgtcctccacctgagcccccttcccgagccccggaccctgctgggtgggttgggagggatgggcggttgcggggtgggggtggcggttccggcaggcgacgcccgaccctcctggatgggttggagggttgcagggtgggggtgggggctgacaggcgatgcgcgcccctggtggctcgcggggcacttctctgggacctgggtctgcgagggtctccaggaggcgccgggcgttcgggacccagacagcgccagggctttaggagcccccctccccgacccaatatgactccagctcgttgcaaacagactgaatctcctctcccagggccaccagcacctgagcgtgtacagagcatggatgggccccgaaactctcatttcttgttgccaaattaaatccaggcaaatgccagcatgcttagacacaaacgaccatttatttcacacgaaacgaggagaaattgttgatgcagccacctcgggggtgtgcgggtcagagggtcagaggacggcctcggggaggctggcggagggcgaggccccagtgggcagggctgcaccgtctgccacccttggctgtgggaggcgcagctgcgggctcgggccctggtcgtccgtgtgacttgtccccacctggcacgagtgctgcctttggtgccttgggatctgctgtggggccaggggctcagtgctgtgtcctccaaagctgctgctgagtctctgcaacctctgaggtggctgcaatgtcaggcccccagggacccgggcctcaggggagggccaggaggaaggtcttgaagtatttgatacttggggacgggtctcccaagcataacttcccgcagagccacagccaccaaatcactctggagaaaagcaccagggggaggggccacgggagcggagcacagaccccagctgccctcgcatacccagaggagcgtgttcgtctccacagcagctccgaggatgcgctggctggagacagttcagaaagtcggaaacgtcaaagggggcgatgccacagtgtcattctgtctgtggagccctaaagtgtcagcccagggggtggttctggggtctctggaggaacatcctgtgtagcaggggaagggggggtgggtgtgggggatgggtgggtgttgggatgggtgggtgttggggatgggagagtgttggggtgggtgggtgttggggtgggtccgtattggggatgggtgggtgttggggtgggtgggtgttggggtgggtccgtgttggcgtgtgtgggtgttgggatggctgggtgttggggatgggagagtgttggggtgggtgggtgttggggtgggtgggtgttggggatgggtgggtgttggggtgggtgggtgttgggatgggtggctgttgggatgggtccgtgttggggtgggtgggtgttgggatggctgggtgttggggatgggagagtgttggggtgggtccgtgttggggtgggtgggtgttggggtgggtgggtgttgggatgggtggctgttgggatgggtccgtgttggggtgggtgggtgttgggatggctgggtgttggggatgggagagtgttggggatgggtgggtgttggggtgggtggctgttggggtgggtggctgttggggtgggtccttgttggggtgggtgggtgttgggatggctgggtgttggggatgggagagtgttggggtgggtgggtgttggggtgggtccgtgttggggatgggtgggtgttgggatgggtggctgttggggtgggtccgtgttggggtgggtgggtgttgggatggctgggtgttggggatgggagagtgttggggtgggtgggtgttggggtgggtatgtgttgggatgggtgggtgttggggatgggtgggtgtgggggtgggtgggtgttgggatgggtccatgttggggatgggtgggtgttgggatgggtgggtgttggggtgggtgggtgttgggatgggtctgtgttggggatgggtgcgtgttggggatgggtgggtgtttggatggttgggtgttggggatgggtgggtgttggggtgggtgggtgttgggatgggtccgtgttggggatgggtgcgtgttggggtgggtgggtgttggggtgggtgggtgttgggatgggtgggtgctggggatgggcgggtccgtgttgggatgggtgggtggtggggatgggtgggtgttggggtgcatgggtgttggggtgggtgggtgttgggatgggtgggtgttggggatgggtgagtgttgcattgagtgggtgttgggatgggtctatgttggggtgggtgggtgttggggtgggtcggtgttgggatggttgggtgttggggtgggtgggtgttgggatgggtgggtgttggggtgggtgggtgttggggtgggtgggtgttgggatgggtgggtgttggggtgggtccgtgttggggtgggtgggtgttggggtgggtaagtgttggggatgggtggttgttggggttggtccgtgttggcaatgggtgggtgagttttggggatgggtgggtgttggggtgggtcggtgttgggatgggtcagtattgggatggccgctggagggtgggggcagctgggacctaccttggctgacccctccccagaccctgacagtctgagagaggtgggcttggcatgcagcgggcagcagaggagagcagttagggaagtgaggctggggaaacagggagggagagagacagctgcgatgtcattacaagtcagtcaccaacagtttccaggtagggaaggcatctctttatggcagcaaaggtgccaggaaggtgggctggggtcttccagcagcttccagagctgagagcagctgctcaggggtctcaagtgagtgtggtgggctaggccacccacggttatgctgcccattccatccccctgcctggggaagggcagggcaggaacgaaggggggtccttggtctcggcatggggcagggacccccgatgtgggagcaatggacacatcccagtcctctctccgtctctgccttgtcaagcaggaagccttcttggggccatgggtccctaatgcttttctacgcccagctcaggtcctggggatcaaggagccgcaggctgggatgggcgagcctctgcaggaaggtcctggtttatttttgcggtcgctgtgcaggtcaagagtgatgctgcttcacctcttgtggccaccatggtgggttcctttagaaagatttatttaaggacgtcaaagaaactgagcagcagctgcctctgagaacctggcgtagggaggtctcatcttcctggggttatacccgttcaaacgcagagacagagaagaaacaggaagaactgatcgtgcacaatagattcccccaagttaaaggtgcggggatctagagaggagcgttcagtaagccccgcacgggcgtgctcagctctgtcccgcatcagggagccaggccaggaaccgaaatcgggatgtgggccgacgcttaacctggacagttgtccccttggcgtagaagacaccagcacaccccctccactttggacagatgccgtgaccagcccggagccccagcagctccattcacaaggtgcttgggaaaataaatttaggtgtctccattcgtaactcagcaatgtgattgagcgtctgtgggagaagccttattcctgcaacggctgtgtgtgtgtgatgggccggagcccgggggagtcaggagctcagactcaagtgaagctcagagtgaacaggaagggtcacagccgcaccgtcccccaacccccaggcggtcagaatccagagcgtgggcccagggctgcccctgcccgtcggtccccggagaaaacgcccggtgtgtgcggagcttcaccaccagggggagtccgaggccgtgtccaacgtgggtgtgcgggagggcggggggagggtgtgagccagcgtgtctgtgtgtccatgagtgtgagggtgtgtgcaggcgtgtcttactgtgtatgtgtgggtgtgagggtgtctgtgagcctgtgtgcgtgtgcgggtgtgtgcaggcatgtcttactgtatacgtgtagttgtgagggtgtctctgtgagcgtgtctgtgcatgtgaaggtgtgtccatgcgtgtgagggcgtgtgcaggggtgtatatgtgtgagtgtgagggtgtatttgtgtgtcttactgtatatgtgtgtgagggtgtgagccagcgtgtgtgtccatgcgtgtgaaggtgtgtgcaggcatgtcttactgtgtatgtgtgggtgtgagggtgtctgtgaacttgtgtcatacatatgtccatacgtgtgagggtgtgtgcaggcctggcctcctgcactagtgtgggtgtttgtgtgtgcaggtgagagggtgtctgcctctgctgtcgtgggttgggattcgtgtgtgcaggtgagtgggtgtctgcgtgtactgctagtgtgggtgttcgtgtgtgtgtgtgagcgggtgtctgcgtgtactgctagtgtgggtgttcatgtgtgcgggtgagcgtgtgtctgcgtgtactgtcgtgggttgggatttgtgtgtgcgggtgagtgtgtgtctacatgtactgctagtgtgggtgttcgtgtgtgcgagtgagagagtgtctgcgtgtactgctagtgtgggtgtttgtgtgtgcaggtgtgtgtctgcgtgtactgctagtgtgggtgttcgtgtgtgcgggtgagcgtgtgtctgtgtgtactgctagtgtgggttgggatttgtgtgtgcgggtgagcgtgtgtctgcgtgtactgtcgtgggttgggatttgtgtgtgcgggtgagtgtgtgtctgcgtgtactgctagtgtgggtgttcgtgtgtgcgagtgagagagtgtctgcgtgtactgctagtgtgagtgtgtgtgcaggtgagtgtgtgtctgagtgtactgctagtgtgggtgttcatgtgtgcgggtgagcgtgtgtctgcgtgtactgtcgtgagttgggagccgtggatgccacgcaagccccgaagccccagctttctgagcagctggcctgtgacggcggcatctcaggcggcttggctgtgtagtggggatcccccagcaggctccaggaccagggtcttctctttggctccaggtgaccccagcagactggccctgcacctggccctgtgttgacatctccagagggtttgtgagcagagatgagggcacctgtgaggtcaaggatagtctctgtgtggcagcgggaccttgggcccaggggcagcctgtggctctgaggatggctgtgagtacttggcaatgaccctgttagttgagcttgtgcccggcagggctgagatctcccagcatgtggcatgggcccctcaccaccccgagtatggaccctgatatggtctggctctgtgtcctcacccagatctcatcttgagttgtaactgaattgtaatcctcatgtgttggttggcagagggacctcgtggaggtgatgagatcatgggggcggttcccccatgctgttctcaagacagtgaatgagtctcatgtgatctgatggtctcataagggcttttcccccttttgctctgtgctcattctttctcctgtcaccctgtgaggaggtgccttccgccatgattgtaagtttcctggggctttcccaaccaggcggaacggtgagtcaaccaaacctcttttctttatacattacccagttgagtatttcttcatagcagtgtgagagaggcctcataaagacccacttcgtagatgcaccgagactcagaccctgaggtggggctgggtggccgcaggctgctcaggggtctcaagtgagtgtggtgggctaggccacccgcggttatgctgcccatttcatccccctgcctgggtgtgggtcttggtgtgtggggtgggattacaggaaggagcagtgccctgggctggcctgctaggggtggcccagccaggaggctcccagcagggtcggctctcgggagctgggtcatggagggtggggacatgagggtcagggagagggcccagctccctgacagctcctggggctctgtggcagggagagcaggtctgctggggccagctcatgcttctggggcgcagccttgccctgacccatgggctcaacggagggccgggtggggctcccacagagcagtgggccttgggcctcagctcttcccagatggaagctctcgagcagatgagaggggctgtgagctcctatgcgctggctctccacgtccctgctcctcctcttcctggtcacccctgccagccccttcctctggtgcttgacctcgccctactccccacctcccggcctgtgagcagccttggcccggagctgcccttcctgatcatggtcgggaccccaggcatctgcccctacgttggcctttgccaacagctgctcaacctgcgaggaggtgcagggagccgccggccccgctccttggacctgatcatgggcaggtggaagcaaaccgcctctgagaagggctgctccacagacactgcaggagtgcctgggtcccaggacagaccctctgttgggtgcaagggatgaggatggctgtccccacatgtctcctagagaaccttcaggtgggaatccttttaagtgaaaatattcaaaacaaccaagctctccaagctgtggagggcgattctcagacttctcgcccggcgctgccaaaatcctgtagccggggtggatggggtgccctggctgcctcccccagcccctgacaaaccggccatctggccttggcaggtgacccctcctcagcagcatccttgacaccgccaaggtgaatttgcacctagaggtcccggcaggacttcgttaatgagcgtgctcctgcctcaggactctgcatattctcctcctccctgccatgcccagaccctgatgtcccggttctccccctcttctccctcagctctgtgctccaacgccaccttatcagagacccccacaagctgtggatgggggctgtgaccttagagccccgagtggggagcacacccttatcagcagactcctggcttccccagcctctgacccctctgataccaaaggcgtcagatgtcaggcgggagacacagacagcaggagccaggacagagtggggaggggaaggggaggctggtgggggttgcgtctcgtctgctcgctcctggcccaggcttaccagtggtggcctgattgtgacaggctggatctggcagctggaggggctcagcatcctctctggggaggcagggaggccctgagggaacgggtgagtggaacgtgaggtgctctggtcacctcccccactcttgggcagacaaagcaggcaccggccatgcgggcaccagagcaagctcctggatgccaggatggggctggcagcgccaaggtgggcacaggcaccaggggctgcttgcctctgagagtccagggaaggctccttgtctcccaggcaggtttgtgtcatggggacgctccccacgtgacactcactgctggcatcgtgtgaaagggagggggcacctgcactttgctttgtcagtctctgtcttattcctgtccttaaggcatcctgacctgctcatttgtccacctgccccgcagccagcccactcgcctgcctggagggtttgaagtattctctaggctcagggggagagctccttctggctagtcttagatcacgggagctgatagaacgccagaatgatccagcccagccccctcatatagcagatgggaaacaggtaggagaaaaagcatctgtccctggtccctcacagccttttcctaacatcgcggttatcaccaccaccaccaccatcatcatccccatcatcaccaacaccatcatcaccccatccccatcatctccatcaccaccatcatttccatcatcaccatcaccatcaccaccatcaccatccccaccatcatcaccatcaccattttcactgtcatcatcatcatcaccatcttcgccatcatcaccaccatcaccgttttcaccgtcatcatcatcaccatcaccatcttcatcatccccatcaccgccatcatcacaaccatcatcatcatcttagcacccactcccaccatgggaaagtgctgtggccccttttctgtcctgtccctttgccttttgaatagcagaaggtcagaacagagcctgaggattaattccagaaaaaaaccctcctctttaccctttagtttctggttgccttcgaaacctcctgcctgtgcctttagagcagacctcttcatcttcctgaggtatgtttgaactccatgagacaccctcctacaacttcagttcacctgctggatgatggctctgtgggctgggggctttctcacggagcagtcactgccatttactgttccttggtgccaggtgggggcttgggcccctcctctctgcatcctccaccatcaccctccaagggccatgagggatcttgggcttgggcctggccccatcttgggtgggacttggtgggcgccctattctaagccagctgcaggtgcacctactatggtcagtcactggccaagggctaaggagacagttcccaccctcgtgggctcatggtccagtggggtcatggcattggcccaatgaccccaaaggtggtgaagttggggaagctgggactccctccagagctcaagaaccacagcaggtgcccagggatttgaggcaggcccttgtggtttcaagctcagcagtcttcttgtgtgggggacgtcacagacctgctcagtgcccccagaggggagggctaggaactcgctgtagagtagtgggaggttgaggttgactgtatgccagggagggggtgagccctaccccctaaagtaggcaagtaacaactgaaagactgtctcaggcaggtgggcacttggcctgagtgtcccctgctcctcttcaaggtgcgtgtggggaccccagagcacagggtgagctcaggcccctgctgtgccccggggacgctcagccacagagcacactggctgcagctccgcatgggccctgccaggctgcacgagaacctcttgacgcagcgattcccaggccaaacccagccacgtttgtgttgcggctccacacagacgggccacgacccttgttgtcagcaaactctctgagggtaaggagctgccacccgaggttcacctccatagctgtgcttctccttctgccacacccaggagagtggatttgctgtgagcaggggctggccgctcatgctgttaggcagaacagctgtggactggtccctgtgtccccgccacatgccctggacatgaggtttggctcatctcaagggtggacctacgtcacagggcccggctggccgacatgaggctgagtgccagctcctacttgcccctccacgttgacctgcccagtggggcccctgggcagggagaccccggccccaggctgactctgacactccccgcaatgttggagccgctgggcgggcagaccccgtccccaggctgactctgacagctccctgcaatgtgcccgtgtcatgcggatttggcctcaggtaggtctcgtcagggacactctatcttcaaaaaatgcagcccacacagtggctgattccaagggtctcagagactctccagatagtgctgaatgagggggccagggccccagggtggcccagggtcctgtggggagactccctgaccccaagagactcccagtgtgtggcgttgtctgcccagccagcctcccctactgcccaggtatagagctgggctccagcccggccagtaggtgcgctctagggccccagaggccactgggccttgtgcctgcccgggctcagaccctgtggttcagccaggaggagcagccacctgggagccttgggcccagaaataggtgggacaggccaggatggcaggtggacttgaaattccacggcaagcacgaccggaaggaatacatcgggggcgattacacggtccttcttcctcctaccccatcaatacattttttttttcttttaaaaaaagaaatgtagtttctctgaaaatttatccatgctgatttttaaaagttggcagaggcgtcgttctggctgtggatcggggcttctggaacaagcaggcccaggagtctctgaggcttccccggcagattccctcccaaggtggagatagggggcggcggggtcagcgggggacgcagtgccctttgtgatggccagggagatggggggccctgagataccctcatgttccttccctctgtcttctctcccaccccctcctgtcctggcttggtcacctgcctgctgggtgacttcagggagtcctcacccctccccaggcctcagtttccccatctgtttagcgagagctgggttagtgcagaggccaccaacccaggacaggcccacatgtcccagaggtgactggccaggagtgtcggatggcggggatggcggccgtgggggctccgctggggaaagcgcagccacccagagcggcggatcctcgacctggccccatgcggctggtctttcagccttccaaggggaggcggatccaggtctttatgctcagtctcctgattttaaagttggcaacgaattaaaataattttaaaaccctgtgcacgctacacaaagcgttggagaggatgggattcggcaggtccttattttaactaacatcttccattagtgtggtgcgtttgttacgataaaagaatcgcttttgacacattttgattttaaaagcccatggagctgccccctcctccctctggggttggaccaagagctgggcctttgctgctggctgaatgagtccctgggccagggaggtcccagtgatggggctgcccggagttgcttgcccctttgcccctttggcccattggcctgtgggcacagccccatcatggcctcccccagcatggcctcctgggtggccttagcctgatggcggcagcaggaaggagaggggcggagcttccgctgagagctggagctgtcaccacgcccggggattgggggcatctaggggtcatggtgtccacctcttgcatgatgggaccagctggcctccggggccatgccacaaacagccaggggacagtactgagtaggggtgggaggcttccaggacccctgccttgctttcagactgtggggcatgggggctgctgagtggggccctacctgagtgagtggtttctggggacaggctgggcacacatcctggcagggccagtctttgggtggcagccctggccactgtccctgcgatgaatgatggggacgctcagcaaccccctgcctgtgatgcggtgtggccagagggccttcggctccctagccttgtcccggccttcaattagctcagaagtggggcgagagcggccagacaacagctttgcagcagggccccgactcaacaccgcctgtgttcccacagcgcaaaggtgttcctggaccgacccatgatggaagtgtgtttggttccaggaggcgtccagggagctggtcacagagctgctccctgccccaggggccctggcggagcccagtgaggtgggggcactttccagccgccgctccctgccacagggtcagtcgctggcagacgctggaggagcccgtccgaccgtgtgctggccctgcctggagtaccccagccctgcaggtggaggagggagtcgagggccagcatctgctcctgaaggcaggggaacccctggagcaggtccgccccagcagagggggtgggtggggttggacctgcaggagggggaagaacgggccccagcaggggagagggctctgtgtgcatctgctggcctgggggcagcacccactggacatttcatgacgggttgctggtgtgacggggtgcgagcttgtcatccggctgtcacctggcaggattcctgcccctgcatcagggggcagacccccctggagctgagggcctcaggccaaccacgtacctggagtccagtacgctcaggacatgcagggacccagccagaccagctggtggccctaaggcagggcgcggggtgggggacgaggcagcaggctcatgtagagacaagctgggggagaaagcaccccaggattctcaaagtaggttcctcccagcactactgtccagagctgatccaagacaggggtgaggggtggcgctaaccagcctggggctggcaaggtgcacggcataggcaaagctcgcctgagctgagagccacctgcctgtgtcctgtgccagcacttcgggagtcctatcactgccccggaccatggccaacactgcacaccaccttgtggaaaggcagctccatccatctgctcagcaccccggagcctgtggggtgacccatgggtgacactttgtttcatccaaggtggttctgctctacaccttgtgtttacagccttgctggctgtgattgacagcttgattttgtcttcaaaaacccatcctctctactcctccaccccttcaccctccaccctccactcctcacctctccacccctccaccctcaccctttcacccctccatccctccacccctccaccctccacccctcaaccctccaccccaacactcctccaccctcaccgctttacccctccaccttccaccctccacccctccaaccctccaccctccaccctccaccccttacctctgcacccctccaccctcaccccttcacccctccatcctctacccctctacccctccatccctctactcctccaccttccaccctccactcctcacctctccaccccaccacgactccaccctcacccctttacccctccacctttcaccctccacccctccaccctccactcctcacctctccacccctccaccctcaccccttcacccctccaccctccacccctccacccctccatcctccacccctccagccaccatccctccaccctccacccctccagccaccatccctccacccctccatcctccacccctccacacctccacccctccacccctccaccctccatccctccacccctccacccctccacccctccatcctccacccctctacccctccacccctccatcctccacacctccacccttccatcttccacccctccacccctccacccctccatcctccacacctccacccatccacccctccattccttcacccttctatcctccacccctccactcctccacccctccatctccaccctctatccctccaccctccacccctccatcctacacccctccacccctccatcctccacccctccacaatccacctgtccacccctccacccctccatcctccactgctccaccccgcacccttccatcctccatcccttcgccctccacgcccaccctccacccttccatcttccatcctctccacccttgcatcctccacccctccaccctccaccccttcacccctccatcctccacccctccacccctccgtcatccacccctccacccctccatcctccacccctccacccctccgtcatccacccctccacccctccatccttcacccctccacccctccatcctccatccctccacccgtccctcttccatcctgcatcccttcacccttacatcctccatctcctccacccctccatcctccacccctccaccctccacccttccagcctccataccttcacccctccatcccaccacccttcacccctccatcctccacccctccaccctccacccctccagtctccatcccttcacccctccatcccaccactctccacccctccatcctccacctctccaaccctccatcctccacccctccatcctctgcccctccacccctccaccctccatccctgcacccctccacccctccatcctccacccctccaccctccatcctccacctctccacccctccaccttccacacctccacccccacctctccacccctccacccctccatccctccatcatccacctctctacccctccaccttccacacctccaccccttacccctccatccctctacctctccatccctccacctctccatccctccacctctccatccctccaccctccacctctccatccctccaccctccacccctccacccatccacccctccgcccttccatccctccaccctccacccctccacccctccatccctccacccctccatcctccacctctccatccctccacacttccatcctctacccctccatccttccctccctccacccttccatcctctacccctccactcctccatccttctgctgattaactactcccagaactcagcacgttccctaggaatatcccctcttgtgggtcctctcacctgccctgatggtgaggaaggtcaggcccaggtgggagtccgggctgggtgtgccagaggggcaaggcagaacccttagctccccctgctgccccagggcctgagttggggcaggaaggcagggaagaggcccacggtgcccgagcaaagctgtcccccgtaagcctctctgttcgctcttcccgatgccctctcgccctcctgacctccacccctcctgggggagatacagcctctgttcacacttgtgtgccagcatgcctgtctgtccagggccctttgatgccaccaacacctgacaaaggcaggctgggtgctgccatgcccccattttaaagatgaggaaaccgaggctgagatgggtgaagtaaccacaacctgacccaggaagggccaggcccacctctggcaggggccctgatgctgatgaagatgtcttggaaaggtacagcatgaaaggcttggcctcgcagatggaatttcccatgtcagggagcaagtgttttctggccttttcagggaccctgtaaatggcctctgggcccccaggccggcccaggccagcaggctgcagtctgactcagctttctgtgagggtcaggctgtcctggctctgccacgccccagcccatcccccacttagccaggcacctccctactgcctggcgctgaggcttcaccctcccactgcagcatgcggtgggaccaccctggccccagtgcaggggtgtccgggatcctctggggtgccttctgccccagggtgtaaagcctcccatggcagcccctcctccagcctggctcagatccccaccccacgccttgcacctgtccattcctggctttaaatagccatgacgagctatccagctcctccctgtgctgatggggccagcacagacttccccaaaatgccacctcttcccactgcccatgggcaggccaaccagtcctgggtgcagcaggaaaatggccagaggacactcagcatggctggagagccgggatgccttggtccaggccaggcttgccgcgaccttggagaggacagagaggcagggcttggggcggtggctctcatggtagtggagtggcctgtctgtgaagcctgggcagtagccgctaccgagtccctggtgccatggtcccccaaaaggccgtggtggttaagccctttgcacatgggcaggtggcaggtgcagccgtagagccccgcattagtgcctgtgctggtttcctgcccagctccaggtctgggtgagggtggagggtgcccggagccgagcatggagcccggccgaggcctgtctcggaagtatcctctgtggccctccctgtgcccgagcagagtgagccgaggctgctctccagcggctgcacctcagtgctgtggctccgtggctatttttaacctgagtatggtaaatgcatttctacaggaaaaccactctcctcgatcaatccctgcagctgctcggcatggatggcagggctcacacgcagcctgtctgctcctgtccaggctgctgaggactgtaaccgaagcccattagctgaccgggagggataaatccagctcctctgacaactgcttctcgctggtcttctctggggacagacagccctccccacccaccccctgctgctccttaatataactctgaagtcatgcctagtgctcagaggatggcttgggaagagaacttgggcctgggttccccggtgattgggggcacagggtggtggtggctggagcaggagcgtgaagccccaggcttcactcgcagggagtgaggggggcttgtcttggggcagtgtcctggcaccattgagctgggggttaactcagagccatgatccccctcaggttgcctgcaaagtaccccggggctgaactcatgggggattttgggagagagctggctttcgtcagatcctcaaagggatccttgaactaagaggtaaagaggccccagtccgaggtgcctgtctgccggctgcctgcgacgctgcagggaaggtcctggtacctgctcagagggtctccccaccctcctggtctgcaggccccgcctggagcactctctgcccccacttccttcccgttgtcctcctcctcagctgcactttgcactcgcgctggtttctttgccgtttgcttctcccccgaggagctctgccggggcagaggctggctcgttcatggatgttactccggtgcctggagcagtgctgggtacagagtagcagcttagcaagtatgtgcagaatgttccagaagaaggtgtagggcggcatatcagtcaggacaggccgggctacacttcagcaacagatacacccgccccacgtccgcgtggcctcagacaacaaacgttgatttctttgctcactttgagcatcccggagccatggtggccgccgtggacaggccaggacatcgtcatcatggggagtggctccctgtctccttgtgtgtcctgcccgcgtgtctgcttgcgtgtctgccagtgtgtcctgcccggggtcttctgcacatcaagaggctcttgacgtttctcttgtcagaccaggtccaggtccacggccaaggaaggcagtaggactcttgggataggaaggacgggagccgggaatcggggcaagggccctttggccagaggaggctctggtgagcatgggggtggtgtcacttggggccaccgggaagctccctgccctgcttggcattgtgtggtgggcacggccccgcagagggagagggctcatggaggaaggagagggctttttcctggagcagggatggccttgtgtcacccctcatcccttggaactggatcagagccggcgaaggagccctggcccacagccccagccccatccccgtgtggcccttcctgaggctccctggggggaggctgagctggcacaggtacatcagccatgccttcctgggtgtgcctgtgacctttgacatgatttgcgaggcagtttcatttggggtctttattttccagccaggccttggaggctcagttgatctcaacagggaggcaaatacattgtgaccttctgctgggaaagatgttaacttttgcagtatcccgtgggcgatgacacatgggacaggggaagggacgtgtctgtcgtgggtgcgtgaggctgcagggacgccgcctctccaggcttgaggaccctctgccaggcctcggagctgggacgtgatagccaccccatctagcccctactctgaggttgggaagctgaagccaggggagggaaggatgcctggggcccgccagggagaggaggcagggtctgaggtggggaagctgaggccaggggagggaagggtgcccagggcccgccggggaaaggaggcagggctgggttaccaccatccacctgcctgtgaagggttggccaggcctcggccacactgagtcagcggctcagacagtgtctggtccttcctgtgccctggtgagcaaagcctgtgagccctagtgtccctggcctcttggggcttctgtgggggtgacggcatcaacgtgtacaacaacatcgtcatcatggggaacctgggggagctgaatccatgcccaggggcctaggagaggctggtgacagtgaggaccactagggaggggccgtgaacctccagggctgagagggagactcattttttatgccatctggcgcagttagattttagaaaaacaaacgtggatatactgtctttgaagaaaatgaaaataaaaccagtaacaagaacaacgatggcatcagtagtcacggtaacagagctctggaggtcaaggctggcggccccggccattcccagacttgcttttgtccgaccctggccctgctctctctccatcgtgggggcctgtcggtgctggggagactgtgggctgctcggtgttgggacccacacaggtgctcccggttcctcctggctggaggtcccttccctgggagaggtgaggggagtcgggaggagccacctgtaccggatgccccacaccctgcccagggtcctgagctcagagatgctcaggagacaggaaatgcaccaggcagggcgggtggtcgccaggtgccgggagatgaacggtgttgggtcagtgctctcactcctgctgaccccagacaccaggtccacgtgaaaccgaagctggtttttgttattgtcaccaggctcacagaagagtggaaattgcgtttttggaagtcaggatgtggcttctgtccagggcatggctgaacttcaagatgggagagggaccctgaggccccggggccggggagcctgctgtgttgactgtgaacactgagctgccgagggcgacagtttaaaatcaccactgagactcttggtggccccatggaatggcctagggttcacagatgcccaggtcaagacacagattgtgcagaaacttctgcagatgggggtccacccccgtcagagacccctggccccggcccgcgtctgagtgtgacgcgtttatccgaggctgttcactggctctgcccgtccacctggaaacccgcaggtgggcctggttcaccccaggggtgtaggggtgctagggaaggtgcttctgccacgagagccgtggggatgtggtcacctgggctgggcgggctgggcgtcagtgctggacctgggcatcaacctcgctgcagcctgtgacctggacgtcacccactctgcatctcagaggctctgaggggcccagccctttgtccacggtcacccacatggagtcggcagtgctggggcttgacttgggcttcggtgtccccaggggagatgtttgcttccaccccatggtcgcgattccgtaggtgcactggcggggccaagtcttccagaagaacccacatttactggctcagaggtgcctggggatggggaggaccttccatatcatttcagctccacgcagaatgcgtgtcagggagaggaagtgaggtactgaatcagtgaagccaggtggagaggcgcagagccaagcatggccacagagccagtgctccctcaaggcagccctgggtgcggggcccacagagctgcgggcgcaggctgaagggggcggccccgcgcccacctgtccccaccttgctggtgcccacacaggctcctaggacctggggtctccagcctggggcgctgccccctccacagaggcaggtgagaataaagtcacagcttttgggtacttactacctggcaagcccacgagagctgaggtttcccgggctatagcctcagctgttagtttcacaggtgctgtgtgactgtcgcacgtggcgtaaaatttttggtgggcattaattgagccaatgatataattccgcttaaaccgagagcttctccaggtcccgaagttaagagtaaatctgtagacatttatcttatcgctgcgaagggaaacacatcccagatgaattcagccaggagcccgagtctgccccatcctggagtcggtccctctgctgaccgctgggtggagactccaggtggcggccactcagcaggtttggtgcatgcatggcgaccgctgccactacaggcttgtctgcagcaccaatctgcgggctcatcagtgctgggcgtgcagcctggggacgctcacagccacctctgacacccacccagcaggagactatgggggcctgttgtcctccagcctgagacccctgagccctggctacacccagccctgtgcagggtcctgcctaggacactgtagatgcaaaggccacagaggcatgaccagcacgctggctggcacgaggggcagggagtggtgagaactgtggggagccggagagcatctgcccatctggagacatggccctcggtgcccactgaggggccctgggaggtcagagacactgacccatgcaggccagagcaggcccgtctagagctggtttaggccatgggcttctgatatcagggcccatcagattggaagctgcagggggaccagagccactcaccctgcacgggccaggtacacagcaggcacctaaaaatgcttgtgaatgactgaaccaaggatgcaggcggaggcctggtggaatgaatgaatgagtggggcagtgggggcagcagggataggttcgtcgtgagggctgtggaaacagcccctctgcgttccagccctgtccccacgttcagctctgagaaggtgccaggctcagctttctgatctgcaagtgggttgatgctgagagcctgtcctcacccgagcagtgctcagccagggcctcacggtggctcgacaggcgctgaacgggggaggagtgggttttgggaagtggggagggtggggcctgtgcctgtgtgcgggggtcgcagggtggggtcctgggagaaggaagaagaaggaggcagcgcccacccgacccccgaccttctagaccgattcccacagagaagagctctgatctcaggtggccgggctgttacagccacacctgtgccacggccatcacaggccatcttctgttccgtggctgccctgggtgaccttcagcctgtggggcacacgcctcagctgcagggtcctcactgcctcccctccactcacccctcaccgagagccacggggcggggggttccaaaactagccaagtcaccccacatcctgcagaactggtgccatgaggtccggctccccacacagcctccccctgccccccacagcctcccccatgcccccacaacagcctctcccatcccccccacagcctccccatgcccccctcacagcctcaccacaccccctcacagcctcccccatcccccgcacagcctcccccatgaccccacagcctatgcacccccaacagcctctcccattccccaccacagcctcccccatgccccaaacacagcttccccatgccccccgcacagcctcccccatgacctccacagcctccctatgcacccccaacagcttctcccatccccccacagcctcccccatgccccccacacagctttcccacacccccctcacagcctcctccattgccccgcacagcctcccccatgcccccaggaagaacagcaggtccgccccaggatccctgggcccccagccagtgaggtctccttgggactacaggacgtgggtgtcctgtggggccgccccagcacagcacacaaaagccggccagggcagctgccagctcagctgtcaggggaagaggacattatggtccaggtacaggcaggcctgtgggctgaccccggaccccagcgcctgctcaggaaggagagctacccctcccagctcggatcctgcagctgtacttggggagccatggacgccaaggcaggtggccagggcaccccaccccactgcaccccaccttaggaggtgtcccaggtgtccccaagccttcgttttggtgcttggcccctgaacgctcctatcagagggtttaccagctcaggcagcagctgtgggtttcccgcatccagggctgggccccccaagggctctcggcaagtgttcattccccaaggagccaccaggagtgtgtgtcctctgcctctgtgaggggggacccaggtgtcatctttgttcctggcggtgctggcaaagatcagggcttcctaccaaggcccccagccgggcaccataggactttggaggaggcagggtcccagccgcatggcccttctgagaccatatggttctgtctgaagattctgagtccctctgaggaccccaagattcaggtcatggctggacattctccagttccctcccggggtagctccctgagcaccggaaagaggatggggtggggggcgccagcccagagtcttctcttgaggactgactgcacccctgccccaggaacaggattctggggccttgaggcccgcggttcacgccgagagccccttggggacctcggggcaggcgtgtggggcctcctgggccggtgctgctctggctctgtcccgaggctgagctgggcgagtgctcgctgagctgtaagtgggcaggaagggccgggacttggacccacccacctgtctcagccgctcaagcgcttctgggatcaagggtcctgagatagctgccctggccgatgcccagtgggaatgcctgtgacggggctggtaggaggctttctaatcctctgagggtggcgcctgagtcacccagcaggagcgggccctgccctgccctccacagccgctgtgccgttgggtgtgcatgggtcttggtacgtggacacccctgcctctcgtcccgaagtggagagggccggattctccccacaacccctcctgtgccagaactcggacgcatacctgggtggctcttgggacccatggctctggatgcctggcccagaggagcggggccagttgagaaattattcttggtgctgggggtggcattgagtctctaggggtccaaaactctaaccacactgacttgggtggggcttagcctgccggggtccccagcgccaggccccatttctgctaaggtccagagccctctgtcgctggccaccctaagccctggtggatgcggtggagaggacggactttctggggccatcagctgtggctgagggctgggtatctcctagcacccccaccccctccattatctgtgagtcttggaggaagtggaggcggagggcaggggtcctcagctccgctttgttgatggggtccccagaggtcagggactttcctgaaacccctttgagtgttggggtctggagtccaaaccccgggctcttcccctcaatgacccctcgagccccgccaggagcctcacctccgattttgggggactgttcctggtatagagtggattgggagcaggagtccccaagaacctggggcccttcagcttttgtagacaccagcctcggcctctctggagccatatgtggaggcccatgcacaccgggtggggtctccggaggccgaggtaaaagccccacaagaattctgctgactctcacacactgccctctgcctcccccaggcctcgtcccactggccacgcacaggcagctgggtctgggtgtgatgggcaagtgcacgtgtccattggggatgtctggggaatgaggcaaacagacccccaacccccgcagccctcggtgcagcccctcagccccagggcagaacacggtctttctcggccagcgggggatggtgatgggcctcagggccgttcctgctttgctcctgtcatattctagttattttattacaactatggctttctggatcccaaaccatgtacacatgaggatctcaatcctgaagataacataaaaactgcgccgggcacaggggctcacgcctggaatcccagcactttggggggctgaggcaggaggattgcttgagcccaggagttcgagaccagcctgggcaacacggcgaaaccctgtctctacaaaaaatacaaaatattaactgggcgtggtgcgcacgcctgtagtcccagctactggggaggctggggtgggaggatcacctgagcccaggaggttgaggctgcagtgagccgagattgcgttactgcactccagcctgggtgacggagcaagactctatatcagaaatcaaaacaaaaaactgtaacaactttggctggattttctaatttttaaaaaattaatagactttatatttttgaccagttttaggtttacagaaaaatcgagtgtatggaaagcctccgtgtgcccttcccccactattggcgtctcatgttggtgcggtacatttgtgacaattgatgagttaatactgatacccatcattattaactagaggtcatacttcactcttaacactgcacattcagtggtgtttatttttttttgtttttttttttttgagacggagtctcactctgtcgcccaggctggagtgcagtggtgccatctcggctcactacaagctccgcctcccaggtacacgccattctcctgcctcagcctcctgagtagctgggactacaggcgcctaccaccgtgcccagttaattttttgtatttttagtagagacagggtttcaccgtgttaaccaggatggtctcgatctcctgacctcgtgatccgcccacctcggcctcccaaagtgctgggatgacaggtgtgagccaccgcgcccggcccattcggtgggtttggacaactctgtaaagtcctgtatccaccgtcactactgcatcatacaggatatttccgcagccctaaacatcctgtgttcctattcagccctttcttccctccccacaaactcctggaaacctcggatcttttccatagctttgccttttctagaatgtggtatgtttggaatcacacagcatggagcatttttggattgactccttcccactggcaatagcgtttgaggtttctctgtgacttcttgcggctcgacggctcatttcttttcagcaccgaatatgactcgggtttatccagttaccacccgaagcacttctgctgtatacatccacttgtgggaatttgtgtggacgtaagttttaaattcctttgggtaaataccaaggagcacgattgctggaccgtgtggtaagagcacgtttagttttgtaagaaaccgccagactgtcttccagcagccgcgccatgttgccttcccagcagccacggctgagggtcctgtttcttcacatcctcgccagcgttcggtgctgtccgtgttctgggttttggccgctctagtaggtgtgtggtggcatctcttggttgttgttaatttgcgtttccctggtgatgtaggacgtggagcagcttcttatatgctggtttgtcatctgtagatcttaggagaggtgtctgttcaggtcttttgccacccccacttttttttttttttttttttacagagtctcgctctgttgcccaggctgaagggcagtggcaccatctcggctcacggcaatctccacctcccgggttcttcaggctcctgagtagctgggattacaggtgcgtgccaccacgcccagctaatttttttgtatttttaatagagacaaggttttaccatgttggtcaagatggtcttgctctcttgacctcgtgatccgtctgccttggcttcccaaagtgctgggattacaggcgtgagcccccatgcccggccttttgcccatttttaatagggttgttagttttctttttcttttttggagacaagagtctccctctatctcccaggctggagtgcagtgacatgatctcagctcacggcaacctctgcctcccgggttcaagggattctcccaccacagcctcctgagtagctgggactacaggcatgtgccacaatgcccagacaattgttgtatttttggtagagacagggtttcaccatgttggccaggctggtctcaaactcctgatctcaagtgatccactggccttggccttccaaattgctgagattacaggtgtaagccaccgcgcccagctggttgtttattttcttattgttgagttttaagagctctttgcatattctgtggctggcttttattcttttcatagtgtcttttgcagagtagaatttgttaattttaatgaagttcagctatcaattctttcatagatttttctttgctggtttatctgaaaagtgacccccagaactcaagttctctagttggaatttttaattaaaaaaacaacaaccttgagctttacataaagttttaattggttaacacaaaaaatattaacatactcttggatctaaaataattctaataggtagacattttgccacccagtgggtagaggatggtccccccaggctgactgactctgatttggttcaggtcagccctaccatgaatctccatctgctcagcatctaccttgaaagtccaagtgagtaagggagacggtgacttctgtggtttccctggagattcccagggctatcagcgtggctgggggagcccctgactccagctcgggtgtgtggcctcggtcttaatcggggctctggacgacgacgcacggggagataagagcctggtccagccaggctggcaccatggactattgtgacctcctgtctggacagccgtccagtgattgggacaggtggtctgggttttctagcaatgcccccacaccgtctatgccccctgcctcctgcagccctgggtctcccgcagccccggatctcacgcagccccgcctggggccaccaccatgactcgctgaaatgtcaccagggtaaaaaaggtcagagctgcctgggccacatgaatgagagtcctgtgagcagctcagcggcctccccaccagttgtggaagagtgccctctgccccttctctgtctctctgtgtctctgtctctctctcactgctgagtcccagaaggcctccccgaggtccacccacccagaccctcctggaaccccatttcactccctccccatgctctctaatggctggctgccttcacttttctagccagtccttgtgggaggggttgggggcagacctgggcagatgtggactcaggccctctaggttccatctgcccccggccctccccagagccctcctgggagtgtgagtgcaggcgtccagcggagacgctgacaccctctggagtcccagctctgccatgctgggcactgccacttctctgaaaccggcttcctcatctgagaagtgggctggtaagagtccgcacgatggagagggttgcactggacagagctctccgtgtcagcccggctgcaggaagccccccatgtctgtgcccggagcccctgggtgcctggaacttggggaatgaactcaaacagagaccccgcctgctcactgctgtttgcccagctgcttctctggcaggcatggcggggaatggggtcatttctgaatattctttagaattccagcctctattttcacgagccgatcggctgttcggcctcacaccattggcgagcgaggatccagcccgttctgatctccgcccttgtgggcgagtgacaaggtgatgtccctgggggtgagtcagaggaactaggggcctcagaggggcggggaccaggcagggccacctccccaccgcagctccaccctccctttgatgctccctacccgccacccgtctggaacatatgagcggcatgcttaacagaattgtacagtctctctttaaaatttttttacagtaaatggagaaaaacatttgcattatttcaagaaactaagtgactgaagtttgttgttggctcctgtggactttcattgattttcaacaatgggaccaagattctcaataaaaaaatataagcccaacaaggaggcctctcattttcagtagattattttgttatcttttagatggggtgcgctattgaagaatattttggagatttaaaaaaagcagtttaaaaaattaatatctgcccactgtaaacagtaggagagttggggcgctcctactcccaccccccgcctgcctcagcccccctcaggtggcccttacctgccccatctgggtgggaacaagccccccgggcttcagcatctgctcaggctcacccttgtcagctgcagattctctgtgttgggggagggtcccaggagctcccccctcccccaggctgctgtaagtctccggaggcttctgttgggggcagggaggggcatccgcttcgtggcctcacagcaaagagaagagatgttttttctttaagaagcagaagggtgagtggctgcagacggctctcccccagctttgtttagatttatcttctttataagctgcgctgggctggactctctgctaaaccgccaaggggatgtgtgagccaattacacactgaactgggcaggaaatgttgaggaaaaatgaagtttccatctggcaacttccaacccaaacttcgcctggacgcgagggaaatccccgtgagccgcaagatgctctttgctcaacgtcttcacggcaccttcccacgggagacgcgacgcaggaatggagcggggacgagtgggcctcggccggtagctggctccctgcggcctcctaccccggctggggtggccctttgccttctttgtggagaagggacgccagggtcttgagactgttaaataaagcacaatctccgggaagcagagaggtcgagcatcccctaaccccagctagcacccggcagtgaccagccagccccgagccagccctttagagcccctaaacccacagcaaggctgcctgtggcggaggagctgggccctggaccctggtgcttgcaggccatggcggggggagtggggggggctctctcgcacgtttccttacttgtcccaggggccagatcctcccggctcgggggatgtcatgcaaggcagtgaggacccagcgggtccctgctcaggtggagataaagaggaaggcgatggagaagggggcatccatgggccctgcaccctgtcacctgggtgccatccgagagccactgctaggtccctgtggcagcgtcctgtgccacccctgacgcagatgagggacagggacggcccaccagcagtgagaaagagacacacccattgtggaagctcggatggccgttctgacgggaaagtcacctggggttcccccagtgtttctactactgtttgggagtggacggtggtcgttgtgggtggctgattagtgcttgtgtctcttcagctccaacgcgagtggttgacttcccgggcttgtcagtctctggtggctgctgtggcaaacggacccaaacttagtggctcgaagccacctggctttactgtcttacagttttggagaggtctgcatgggtctccctgggtcaaaatcaaggtgtgggccaggctgcttccctctggagacttcaggggaggctcgctccctcctcccctgcctctggaagtgcctgcgtcccttggctcgtggccccgcctccatcttgaaggccagctgtgcagcatggcccatgctccctgctccattgcacgcctcctaccttccctgaccgcttgagccccttgcgatgatctgcactgggcccacccagggtcacctcccatcccatgtccttcatcccatctgcaatgtaaggtgacatggccacctgttcgttctgcagattagaatgaagacatctttggagccattattcttccttccactcagggaagaactttcagtgggtagcagtgccttggctaccatgatgggacggccgggtggctgtcatttcttgggacccccgccctaacacacccctggcgacatgctgagcctcactgcatctttgcaaaccttggcaagtctcctgttgtgcctctggggaagcctctcagtggaagggccatgtcccttttggatgtcatctcaccacatcactgcttctgctacaggtctctcctctgctggttcctgacaggaaggaggtgctgccagcgctgaccccacagggagggtctgcggagaggtagccgggatgatggggtggctctggggacctggggagccaggcctggctgcgtgatgctgcatttctgctcgctcagcctcccctgcccagccactgtggagcaggtgttggtggggtgggcagtggctgcagcctggctccctttaatgtctaccccaagcgggccattcggcctgtccctcctccgtgctcctttcccaagcttcagggtggggggcatcggacccaagttcctctccttggggcaacccttgtcactgtagaggtggctccctggggccactttgagtggagggacggcccccaacaaccctgctttagccgctggtactgatgatgaaggtgggccaggccccgaggctcctttccacttttgcttaggtgaagccaagctggggaggctctgagcgccgggccaccaggggtttctcttcagccccctcctctgctgcagggaagtccctacagcgactcttcctggaatctggccccagtggctggacgatggggagaaggaggagtgggggcggggtgcgccagcaggcacaggctgcaggcttaggaaggtggtacaggaggagacctcttctgcaaccattttagatttacagaaaatttgcgataatacagagagttactgtgtacgtctggtgagctttaaaaaaattaagagactattttttataatagcagttttagttttacagaaaaatgttgtagaagtacagagttcccttatgccccctgcccagcatgtgcacggcccccccgcccccgccccctacggtccacatcccaccacaggtgcagtggctgcagcaggtgaccgggcatcaacatgtcaacatgtccttatcacccggagtccgccctttaccacacggctcgctcttggcgctgggtgttctgtgggtctgacttgtttataacggcacagatttccccctcccgctgcgtcccatggagcagctccactgccctctgccctcacaccctctgggctcctcctgttcacccctcctcgccctaaccctggcagccactggtctttctgctgtctccgtggtttcgtcttttcaagagtgtcatacccagtaaggcttcatttcatatcattgataggtttttggaaactgggactttaagcaaaatgacgtataacaaaatgaatttgaccacaggctaattaacatgaacaagagttaagttcctatggcatatttctggtcacaaaaacatcaccaaacttctaaataaagtccaaagcccttctaatattaaacatggaaacaaatgtgaactgtgcgtttttaatcaagaatttaagaaggattattaaaaacaagtaagataactatttccccacttattccagttcagggtgactagagctcatgcccccatctcggggcaccaggcgggaacccacctggacacagcgcacgccgctatgggagttgccgtcctggagtgggcactcacactccgtcctggggcaggcactccgacgggaacagcttcgacacgccagctcccctacgtgcacatctttggggcacggaaggaaactggagcatccacagaaaacccacgcggacctggggcgatgcacaggctccccggacagtggccctgggtgggagcagatttgcttttctcaacattatgatgaaacaacgttaaagaaaataacattggccgggtgcggtggctcacgcctgtaatcccagcactttgggaggccgaggcaggcagatcacgaggtcaggaaatcaagaccatcctggctaacacggtgaaacaccatctctactaaaaatacaaaaaattagccgagcgtgatggctggtgcctgtagtcccagctactcgggaggctgagacaggagaatggcgtgaacccgggaggcggagcttgcagtgagccgagatcgcgccactgaactacagcctgggcgacacagcgagactccgtttcaaaaacaaaaaaaaaaggaaataacattattcaaggacctgctatcattcattgaaaccatgcgtcatgcagcctctttagactggcttctttcacttaacaatatgccttcaaagttccttcagatcttttcagaccttgatacacgtttccctttattcttgatcagattcatcatattcaaatatcatagttggttacgattattttacttttaaagactgggtttcgctatgttgcccaagctggacgtgaactcctgggctcaagcgatcctcccgtctcagcctcctgagtggttgggatgacaggcgtgagccacgtcgtggggcttcatttctctctattgtagaataatatcccattgtctggatgggccgtagtttgtttatgcgtttaaccctgttcacctgctgaagcacatcttggatgtttgcaggttttggcgactctgaatgaagctgctgcaagcacctgagtgcaggttgttttgcggcagggaaggcctttgctgtaacgatgcagtgtgctcagtcctagtgttatgggttgaattatggccacaaaaaattcctgtgttaagtttctaacccgcagtaccctggaatgtggctttctttggaaatagggtcattgcaggtgtaattggttaagatgatgtcataccagagtaggccttgatccaatgtgagtgcgtcctgatacaaaggggaaatctggacacacagacacccacgcaggaaggccgtcttcatcttcgtgtgatggtgacggaaagttggaggcagagagccagggggtgtttctatgagccaaggaacgccagggtgctggcagctgccaggagctgggagggaggcctgggacagagtcttcctcgtggcctctggaaggagccaaccccactgacaccgggatctgggactttggcctccagaacaacagacaatgcatttctggtgttcagctgcccagtctgctgtcctttgtcctggtggcccctggacactcacacacccagtgggcctgtgtgtttagggctggccatggccaggcagcacgggaggactttgcacacgggatctccttgcagcttctaactgcctgggagggaggtgctggtgtccctgtgtttggtgctcgggctgcctcccaggtggtggtcccagcccagggctccgtggctcatccgcttactgccagcacccgtgatgttcacctccgccccggctgaagaccatgaaaagtttgtgctcaaacagcggcagcctggggttcaccctggcaggtgaccccccgcccacacacgcacagcctccctaactctccacggccccactgctgctcccgagggcttccagaaatttggagctgaggtggggctttgcgaacctctcccgccctgtagcctgtccaccctcctccagccaccctgccgctgatgaggcgcggatagttatttctgcaagaaaagcagctttctctctctctttattccttcaattatgcagccacgtctcgacaacgccagccgtcagagcggtcgggctgagggggacagcgcacaggacagctgcagccagccctgtcatgaccttggccaccagggaacgccctgtgtgttatcaaaatgagaaatgttagccaggccctcgtgagtttgagacgtggagacagagctcctccccgcattcttagcatgctcggggggcctgggggtctgggcttgtccaagtccggggatgggggtgctgcgtctctgttttcagttccggcacctctgcaggctgtcctagggtgtctgaggctcttgccccagaccttggtgggtttggtaattaggggtggtggtggggtggggtgggaggtcactgctctcgtggattgggggtgctaaggcccacaggcccagagcgtggcgggaggttgtaggctctgcggccagcagccagctctgcccagctccaggcccagctccttgctgcccctgcccaggccccagggcctccctctggctctgctcctagaaactatcatctccttctagaaactatcatctcccctcaaacctccagggggggttctcgcccccttagaattaaaccgaagctctcgtgctggctgcaggctgacagcaccatgtgacacctggccactggctaccccgtcattgtcatggtttgcatgggtctccgtggcctggctgggtctgggggtggtgcccagaggctgggttcctcacacccagcagcacgccccgccaacatgacctcccatctctatgccctctgcagggacgcactgctggcctgaaggggttcgagggaaggccacctcgcgactgcctctgcagcagaacccccgggggctgctgtgtcctctcagcatatctagagaaacactcaggaggattcttaatgacttcagtgggatgtgtttgcggtttaccttcaaagtcgtggccgccctttattgaacaaacgcctgagtcagaagctccactgagcgacccaacgcattcgctctactgggccggctgatcatctgcaatcatcacgctgtttccagaggaggaaactgaggcacatgaggcgtaagcaacatgctcaaggagtcacagagagaaagtggcagagaggggatcaaacgctgggattcagaggcggcgccgctcccacagctgcctcggggacggcattctgggcctgagccgggccctggggccgggcatcctggctgaggggcctggaaagaccctacagtgtctgccacggcctcctgctgggcccacacagagcccaggtgatgcccggcaccgctggtcctgtccttcccccacagctgcccaccacggccctgcccttccctgagcctgcccctccctgagcctgcccctccctgagcctgcccttgtggttgtggaccgatcaaagcccccatggctccccgccaccccccttcctgggaggtgaccgataccagagattagctgcctaaacaattaaaaatcctgtttaccggcaactgggactatttcaggtttcacctttcagccagtcaatgcccagtccgtgcggtcaatagcaggctgtctgtctggtgcccaggaagcgaggctggtaggacccaccatgggggcttctgggaggggacagtggggctgtgtccgagagggtcgggggcagtgctgggccctgggagccctggcagggaaccccttcggggcagagtctgggggctgcctgggggctctgtcctcatggggagtcaccaggtggcactgcctgctggccctgagccctccatgccactctttcctcctctccaaatggcaaaaaaacaaaacaaaacaaaaaaacagaaacagctcacgggtttgttggaagatgctgtgtggtacgagatgcgcaggcccagtggacagcaaacaccccatagccatggccgtaccaatggtgacacagctgtcaccacgtgcctcaacatcgccccagctgtggcctctgggtgggttcagtggacctcagcggttctggtacccccagatctttccaaaggggctagggccgggggagggtctgattcaaggagaccaagcacaccaggggttggagcagatccagccccctcttgtgagagggcctgtgggacagccagggcctcgctctctgcagtgctcagctggccctcccatgcctggccagcctccgtcagctccactcccgggagcttgaccctctctcgcctcttccccatgaacgcccctcctcccatggctagagacacacacaggagctgggacagtgggacgggggagatggctcctccagcctgaactcagcccccacctcgagtaagtcacaacctccatacttccttccccaggaaccgagttggctgcaggctcgcagccttgccacttagcgtcagtgctcatggggggctgggcccccttgaaagagagtgaggtggtcaaggaggagcaagcagggagaggcccacggaagcccagcacctcagcgccaccaggacgggccccccgccttcagcctgcagggctcattcagtcattcacttagaaagtctactgggcccccacagcgtagagacttggcaagtgaatgaaacagccccccataccatactcgcagagcacggagctcgggcctcggctggcagggcccctatgcccaggacccagctggcaggctacagccggggtgacccatccggaatccggggagatgggctgagggctgtggagggggccataggagggcctgggggtggggctgatggagtgggatacagggcagccaggctggggggctgaaggtgcaaggtcacagggcccggggcccccagtctgggtgccgcatgagtcgtacccatgtctgggggactaggacctgaattggcacaaggcagcacccaggggcccatccagctggagacctccagtaacagcggaggatctatccagcaaccactgagccctggcctggttctggggacccctcccctcccagaagagcccccatccccaggcctgaaggtgggggctgatgtgtctcctgcagtctgggttcacaagcaagacacaggaggcgggggctccctcggccgcagataggctccggggctgggctccagggctggtgcacttgggctcatgggtggagcgaagccacattttttgacagccccaaaagatggccagtgcccacgacttctgacgagagacacacggatggttccgcggaggctggacccttctgtgtgcgtccaggatggcagcagtgagctagaacagtcaccagggcagctgacagagggcaggggacccctccacgtccagcctgtccagaaccccctggtccccggcaccgcctgggtcttccctggtttctccaggatgccagacagacgcaggggacttgcttgtgagagaggccagttccaaggaggcctgcgggaaacaagccctcactccccaccccaaggagggtctttctcccttggtttctgcctccctgaggtctcctcttaggtcagaggagggagttcccacgggtaaagcactgagggcggtcgaaagccccgaaggccaccctgctccttccttgctggtctgggtgacgaccctacagaggggtgggcctctcaccgaggggcaggggtgctgagagcaggcaccggggcctggatgagctgctgcccctgcccctgccctgttcagcctggccaagcgatcccggggctctcatggggtcccacgtttgaagatgcaggggtggttgagggaagggtcccatctaggaaagggagagggctgtggcagggccaggggaacagtccagtcatgggggaagaaggaggcgggtgggagctgccaggctgggagtgacgaggcatccctgcttgggatctgataaagcttccaggggcaggggaggagggtgcagtgtctgtgggtgggggcagggggaccggcaggggcagccacaagagaaggaaaccggatgggaagggacaagaagggtgacacccacaggggcgggagccccaggctgggtcatggagctcacactaggcctgaacgtgtgctgcacatcttggccagaacaggtagctctctggctgtgggggatcaggtggggggtccggttgctcccaggaggtagagagcattcttgaaattgcctcctggggactcttaagtcaaaacagccactctggtgacccctgctcccatcccacagacaacaggggctagaacatcgggattggcgtgaaattctgcatctgtcttctcgcttgacccttgcagtggctcgtgggactggatggaacccactgacagctggaggctggaggcagctcttgggacacttccctggcttgggcaggcgtgggaagccagcaccctggggtatcagccaggcctctggccataagcagcagatggctctgagaggtgggtgcccttcccacagcccccggggctgctcgctggagcagaggggttcctccctgggatgtcactctcctaagatgacgagatggaggctgagagactgagaggcagtgagcatctatctactgcctggcccttgcccctcaccccccagtctcctaggactaagatggggctaggcctgtgctgctgcagaaacggacgcttcaaccggcctgccatggctcccatttcccgactgtcccggtggagacgggcacctggcggccacacactcagtgtcacagcagccttcgcctctgcggggacaccggctcattggcctcctgaggctgtgcgtggacactgggcccctcgagccaggcggggacacttctacctggctagttaatgccactcggtgttagaagcttgaggcaatgttgccatcattttaagtgcctgccgatttctgtcgtccagttggtcatcaggacacacatatattttgaaggggcccttctgatgtatctattggtggagctagttaaagagcccgacccgatggtggagtgtgggggcagtgaggccatcaggtttatccagctggtgaggtaacgccccaggcggaggctcaggacggcccggcgccccacgtcggggactgggctggagggtggcagcgcccttcaacaccctgcagagggtggggtgagatcacagtggtgggggcactgctggggacgggggggagggtggggacaggcaggccggacaccctggacccccttgagggcctgcaggggtttgagaaggcgggagggaagcagagcatggggaagaaatgcaggagggaaggagggagggaaggaaggctcgttcttttcccttctagaaatcatgaattggttattagaaatcacttcagggccttgctgctggtggggaggaggcggcacctgcaggagaggctggccctgggtgagtctcacgccccacaccctgctctgcaccagggcgcagaccctccctgagtagcagcccccaggccccagcctggcactcatccatctccagcccagagagaggcccggggcagctgtggggccaggctccccaagagggtggctgaggggtggggaccgggagacagatggcgtccgaggctgtcctgcgtctgcctgtgggcctgaagatggatttgagcgcctactatgtgctagggagtgtgctagtcttggggagtcagccacacaggactaagggctctggggcagggacggttgctgcagcctctgacctccaagaattgcagttgagggggtgggggtcagggggctcctgactcactagtcgcatgcccttcacatgtgacttctgcatgccttgtcacctggactgtcactgctgggccagccccaccgccccaggccacagaagggtgcgcgcaaacaccctccttttccaggtggggaggcccaggcccagggcggaggcccctgtcccgtcactcagagtggcagcagggctggacacaaatgggggcttcagctccaggtcagggagcccccatccccaggcctagaagggagggtgactctgcagctctgtggcccccatggcccctcctgtgccctcccaactctgcttctggagaaaggctattctcgggttttcccaacaggtgccgagcacggagcatgagtctgcgctgatgtcagcctcccaaagtgtcttggctgggcctcgaggccacctccacccccagcagtgctgagaagcccaaggcccgagactgacaagcgtttccggggctggtacatcctgggctggctccgaggaggggtggcttcgggctggggctgttacccttatccagggactagagcgagggctggaaagtgcccttccctcccctccaggggaaaagacaaccctgacatgggggtcgatgccccttcctccaggaagccctcctggccctgggtggccccctctgtacctgcgccccattactatgtagttgttggttctgagctgggcttttggtgaggggaggacagggctgtgtccaagctggcacttggatgccactctgcacgaggcctgtgctaagtcctttcccaagggctgggtgctgtgaccctcctggggaggcggggagcccctgggaggttggatgccttgtccaggcagcctggctccagccctgtatcctgctcatgctttgtcctagcattcagcagtgtgcctggcactttgtgtggcctcagcaggtagctcctgaataaaggaatgtgtgcccacctcagccacaattcctacagagggtgggaccgaggactcatttcaaaagggctggcgccacttctggaacccctggttcttggggaggggcccacactccaacaggcagacccggcccagggccatctcctgggcctccaccttgggctcagaggggttggagttagaggtgccgccggcaggcagcgtccccaccccagagccacccttggcccctgcccccgctcagccacagaggccctgcccacagcctcttgtttcttggccatgaggaatgagcccggggcctggaggtgcccctgcatggtctccaggtctcgatcactgacaggcactcggaggtaccaggaggaggcctgtgtggaggcggaggggcagtgctgcacagagggaaatgtatgtgttttggcttccaactgcctctgcaatgacataatcagaaggcttttactgactgggcaataaaacagctcatcactgtgaacacgagtgcctccgcagagtggccgccggcttggcagccctgggaaggtcactcaggagcccagaggaggccgcctggcaggcagcagtgtccccggaggccaagcccaaacacgggcaggccctgggggctgtcgttggtcctgggctgagtgtagcacagaacccccagggttaacccccccacaccacccactgtagctgcagtgctcctggggctgaccactgccgcagagcccctgccaggccccgggaacattgccccacccctgccaggccctgggaatgctgccccacccctgccaggccccaggaacgctgccccgtggaagccattgcccgaacatgattgcccactttgcgtcctgaggtcaaggtgggattggctcagtgaagagctggctcatggtggtgggacagggaggggaggcaggaagggtggcccaggagaaggtcttggagtggaggggccagggggcccacgggtctcgaagaaggcttcatgaggctttagcagggaagggaggaaggagagggtcctagagtgggggcttctcctggcagctcttgggtggagccacctgggctgtggcttccagtgtggtatctgcccccagcaggaggcaggacgggcgtggcccatggtctcaatgggaacgtggggccacgtgaggcatggggtttcctccagcagaaggcagggccgccgtggcccatggtctcgatggggatgcgaggccatgtgaggcatggtgtttcccagcttcaaggagccctggagaccacggatccaggaattcccaccttggagtgggaggtaaagaggcagcgcctggggcggaaagctccgcagtactccgccgtggctcctctgacgttggccaccaggcgaacccaagccccaaaagcccagcccatgtgccacgctccctagtcaccaccggggcggtccccagcccgtgacggcgcccctccctggcctgaggagtggtgcagggcagaggggtgtccgtgaacaccagcagccacctctacgggggtgaggctgggctgtgtgttccgacgctccacaggcaggggcagatttgtactagtgttctgcgctgggtaaccaatcgccacacagttggctgcttgaaaacaccaccttacgccctcacggtttccgtgcgttggaatcccggcctggcgcggcagggctctctgctcagcatctccctgggctgaaattcaggtgttgacccagcttcagcctccctggaggtcaggccctcttctaggtttgccaggtttttggccgaccccagctcctcgcggttggagagctgaggtccctgttctctgtggctggggccgggtgctcgcagctcctagaggctgcccggagaccctgccacatgtgccggggagcgtttcacagcaggctgtggcatcctcctcggagaccagcaggattggtccctgtgatgacctgatggggtcaggcccagccagcaccaccttccctttgagtaacttgaggtcaaagttccctccccgggagtgatgccgtcttgcctgctggccctgccctcactcggggagagatggtggcgggatgcaccccacggccagaattggccgattctgcctccgcaggctttggcttccaaaggaagtcgggagactctgagcctctcgctctacagggagagccgggaggcccctgagatggacgccccctcagcaaatgcctgagatgccgggctgaggggacagaagctttgcccatgagccctgcccaggcccagcccccacccctgccctgctccaggcagccatgcccagcccccacccctgccccgctccgggcagccatgcccagcccccacccctgccccgctctgggcagccatgcccagcccccatccctgccccgctccaggcagccatgcccagcccacgtgcctggcgggagcatttctggtggcagccttgcccccggtcgttgaggccccggatccacgggacgagtgccgtgagaggccggctgtctcagttaagctacctgaagactccaattcaatcatttatcaggtcccatcataaattcaaggcagccctccaaggtttgaagagctcaaatttgacttcctcgggagttttacgaggagcaggagccatttgtcagggcagacggctccatctgttcagcgggcgcccttcggggagggaggttcctggcaaaagcaaagctgggacggaggttggtgctgtcaggaggccacgtgtcctccagggaccagagtgtggcccctgagagtttgtttcttgggatgattagcaattcagccagggcaggggcacatgggggtgccggggggtaggggaaggtggggagctgcagccaagtaactgtgagcaaagaaaccctggccggcttgagctgcagccaaacgcagctgccggaggcctccctgctcagggcagcacccccatatcccagccaccaggcctcttctggagggaaactcggcccacagggccctgaccctggaggggagaaagggtcacccaagcctccctactatctgcagcctgtggtgggcacccgtcagctgcagaatgtgggggttagatcataaggcaggaacagcagcttccttgccttctgaacatcccgtcccggagctggctggagcctggctcagcagagccaggaggcgcctgcagcgttgggacacgaggcgagctgtgcagagaggcagccgcacctcgctgggcccctgggtggggggtgctgcactgtgccaagggcttctggggctcccaggtggggtgagggctgcatctgccatggagcccaaagcctccttgggcccaggaatggggttcacatcaggaaactgcctgaggggtctcgttcctgctgtgccccaggagcgagggctggaggaggaggagggtaggagacggttcttccagaattgaccatttgagccaggtctgggggccagaacggcaacctcccccatgtgtggcacatgttttaatctgtcaagtggctttgtggccaccatctcagaatctccgaaagcagtagcaatgggaaccaccccccaccaaagcttgtgaaaatgcagattcctgggtacaccgcctgggtacgcctgggtacactgaatcctcctacagctgctctggggtagtgagctccccacctgcataagcatttaaccgaagcatccagcttcagtgacaggagggctactggaccagatgacatccagctcagtcccagatccactgaccgcccaggggtctcgatcacctgattctcagcagggctggtggaggctggcaccaggatgactccggaccaaggtgctgggagcccagggccctcggggtaaggggtgcttcacagtgagcagcccgaggcacgttcccatgggccattgtcacaccctgcctggggctgccagctccagggggccattgtggcctgcacccccgaggaggaggacaccgccccctacgggtaccctgagcctgctgccatatttgtaaatgctacacgcagggaaccaaaaagtccccggcccaaatgaaacaaaaccccagagagcacctgcttgggcccacgagaaaaagccatcttggcgtcccatccgcaataggactcagcttggcagcctgcactgcgcagcgttcagctcctttccaaatgagtttggcgttttttataaaaagcacctttataacaatcccagaatgaatatttatagggcagggatgagggaaccggctaattgtggctgagatcttgccggatcaacactcctcggctcccagaggatgtgcacaggagattaaagctgttcccttcatccctgggctcagggctgggctccgggtgcagggtggagacccagaaggaaccctctaacccttagcagatcataggctaatgccatgaccaagggcatcaggggctggggatgttcttagaaatagggcccttgggaggaggtgggaggccaaggctaagggcaaaatgagaatctgagaatttggccagtgccattgggcctcctctgctgggagctgagaattcagcctctgccatcgggcctcctctgccgggagctgagaattcggccgctgccattgggccttctctgctgggagctgttacaagcttcgggtggggtggatgatgaggaggcaagacccagtgtgggcgtccatctgggtgtcttggacaggacagcccaggacccctgctgtccaccctggagagcagaagctctgagctctcccccagccacctccttctgtgcagtccctgggagaggggcagggaataggtgcccagagtgggaccaggcgtcgtttggttctggagctataggcagctgcaagagatgctggtgaaatctgcagagatgaggtcccctctgagccttggggctttgctggcagcatcgctgtggcctaggacacagggaacagaagtgggtggctaggatcaggcccttctttctccctggaaatggaaatctgtctcaacccagaaaaatactctgcaagagctggtgaactcgctggggtgagggacctgctagctcccttccctgcctgtggtccttgtcccctgcaggactggccctgagtggctgggggctgggcaccattcctgattgtccagcagtgctggactggggagggtcctcaccatgggtatgtccatggaggggggctcctccctcagccccagcactgctccccaaccctgaccctgctcttccactcaccccctgcaaagatgagcaaagttgcagctccaaggggctggggcgggcagctcagaggagcccaggctgcccacttctgccggctcgaaatgacttctatttgcttctaggatgggtcagtgtgagtcctctacagaggagaagcaggcagacccacagaaacacttatcgcccccacccgacgcacacacccacactgagctggggcatcgagcagagggacggagcgggaggagcaagtcttcggcgtcctggggcggggacatggagagatcagaggtcagcctgggcccccagggccctgttgtatgtcccctgccccttggggtcctccccacatcccggggggttctgggttggctggactcaaggatggtgcagttgtaccggaggccgccctgcgctgacccagagcctctgagtgacccgtgctggaggctccaagcagtgccacgtgggcctcaaggagtgttggagtctgcgacagcaaagctgtcaccattctgagtgggatgtctgtggctggaagcaaattgctctcccctaacatcatggcaatgaaatagaactttatgagctgtcagagaggctttgcccactgcccctcaggtagtgcgtgtgtatttgtttggctccgtgtgcacctgtgtaccctgaggttgggcaggaggcggcctcccaggcacggtgcaggaggacggtgaggtcccgttcctttttgtagtgttgcgggacatgctggatgcccacgggcacttcacacacagctctggtctgtggggcacacaggtgtgcacagcctcctgggagcttcccaggatacctcatgtttgtgtgagctgtgtgctggggtgtggggcaggcagaggggacgatggcagaccactgtaggctacgtctcctgctgggagctcggacgagtccacggggacctcttaaaggctctgaggaggcccatcctccatgccagtgacagggagtctcccgggggagccctgcttgtcccccctcgacgctcgtctgggctgggagggtctcctggaaagatgtgtgaaggaggggcgaggtcatgagtctcccatggctgctgtaacaaaagtcacagtttattctcttgcagtcccaaaagtgaaataaatctaaagtccatgtgttgaaagggctggctgctggaggccctggggagaatccgggtcctgccctctccggggtctggaggttcccgcgccttcacccgtggcccctcctttaaagccatctgtgctatgtcttccaggctccccctgactctgaccctcccaccccctctcctaaggaccctgtgaggacactgggcccacagagagcatccagtgtgatcctgctccgtccctcctgcagagtccctgctgccacataaggtggcacggccacgggttcttggactgggacgtgtacatccttagggggagtgggcattactgtgtccccacacagggaatatgacagcagcagactggcttgggcagtgctaatgctgagttgtcttacggccctccctggcaaacctgtgactggccccgggacagtgtccttggccaggagggcagccaccccccaccctgcctctctcccaactgtggctggggcatcaggagaggcaaggtcagacctcagcagtagctgcccctcctcagtgggcagcctgaagggccccaagctcacggtctgggtggccctgtgtcccagggcagaggtcactgagagaggtttggggctggactctgagctgggcttttttttttttttttttttaaacagaggtgaaattcacacgacatacaatgaccactttaacaagtgtggttcggtggcatgtagcacatttgccacactgtgcagccgccacctctgtctacttcccagacactttcatcccccaccgaggagctctggagcccattaagcagtcactcccgttcctctccccgcccccgcaccgcggaatctgctttctgtctccatggagctgcccgctctgtgcatctcctatcagcggaatcctgcaaccggcggtctctgtgtctgcttctcccgccgagcagggttttcaggcacttcgtgttaccgctcgtgtccccgtgtcatccctttttagggctgaatgctattccctcacatggatatgccgcacttcatttatttattcatttatttagagacagagtctcactctgttacccaggctggagagcaatggcatgatctcggttcactgcgacctctgcctcccgggttcaagcgattcttgttcctcagccttccaagtagctgggactacaggcgctcatcatcacacccagctaatttttatatttttagtagagactgggtttcaccatgttggccaggctggtcttgaactcccaacctcaggtgatccacccacctcggcctcccaaagtgctgggatgacaggccatgctttctttatctgtcatcagctgacaagcctgtggctcctccgccttttggctgctgtgaatagtgctgctgggaacacttctgtgcgcttatttgtttgaatatttctttttattttggggagctggtgctgtattagtcaggtcttgcattgctgtaaagataaacctggggctcggtgatttatgaggagaggtttagctggctcacggttctgcaggctgtataggaagcatggtgctggcatctgctgggcttctggtcagccctcagaaagcttacagtcatggcagaaggcgaaggaggagcaggcttgttacattgccagagccggaacaaaagacagagagttgtgggggaggtatgacacacttctcaacaaccagatctcgtgagaactcactgtggtgagtgggttcatggcacccagccatgagggatccacccccagaacccaaacacaccaggccccacctccggcactggggctcacagcttaacacgagctttggaggggacgtgcaagctctgtcagaggcccaggagtgcaattgctggggtttatgacttcatttttcaagggactgccaggctgtttccacagtggcttcacctgcatgaggtggtcaggggtgggtgaaggggccccacgtgtggctgggcagcagtgacagggcttggtcaggagccaacaccctgctccttgcagtgaacaagaagcgcacagcccgagagagccctaagtgttcacggccaccctgtacctacacagctgtggggtcagctccagggaagtggcctgctcagcctcagtcctctgctgggagcccattgttcgtggatttccagaaagaggggtgccaggtgcacactcgactcactgagtgggccgctggtccgggcacagtggaggcctctgctgggacgtaagatactatgggaaatactggcttcaagaaacccaagaaaccctccccacggagcaccttggctgctggggctttgtccggccgcggtgggcgactagggacagctcgggtgtggggtagctgcggctggaatcctgcggatgaagtgggagcagccctcatcaagccaccgctgactgggaccacggctccccaacagctcccactgcctctggggttgggcatcctggcaggtgtccccgcccctgtggcctgaccctccaagggtactggccctgccgtgcacctcccccactgaataagccctcaacctcgccccactcacaaagctgaacacatatgaacgcggcttcagccagagtcccctgtcctgcccacagcccagctgtccagctgttcaggggtccatggattcatggatcagttgattgatcgagtcattcattcattcacttggtcctctgagctccagtgtccaaaggccgaagagaggtgaggaggcagccctgcccggggtcctccctgagctcccacttcctcatcacccctaagggggtgctgtggccccccttcccagttgaggaagctgaggtcagagaggtgagagacctgccctcatccacacccaggcccaggctcggaagggcctccccctccaccggggcacagtgatgctgggcgctggcactggtgaggcgcctccctcagcccgtcctgctggtgcaggaatgccaaggaattgtgggtggcagggccctcccctggacaagggtccatctcagggtgtctgccccgtcggctgaagaccccctctccctggcagccggggcctggtcacagctgctcctgggaccctcaccttgactgtgtgaatttctgcccacgatagagaccccgaatccacggctgtggcgggtgcaggaggaggaggatggccctgccggggcgtgtgtgccacattctgagcacagacatccctaggggattgggatgccgcctggccctgggggctaaggggccacttgggacactcagcggtggcccagggtgaggctggaatccagaatcagatggtccttcccggcaatgcagccccctccgcagaccggatggtgtggccccgtgggaagcgctgtggcgtggggctccatgaccgcccttggcttccgagaaaccgctgctctcctgcgtccgccctccgctcagcttgtgtggtgaactcccctcgtgcgcgaggtgccctgtggccagagtctgcatgtgcctctacttacccaaatcccaggggcctctcgctgggagctgcccccacccagtcagccccgggaccctctggtctgtgctgcagcctctgcgttgggcagcctctctcctgtttgctctggcaccatccaggccacagtctccgtgctccccactctccagcccggctcccctcttgctgcactcagagtcctggggctggggcaggttcagatctggggacagacaaggatgtaggggcaggaagataggctctgggtcttcgcgtgctgggcaactggcttttcctcctgagcctcagtttccccacctacaaaatggtctcagaaggctccctggtgacgggccgtccccctcctagggatgcactctgttcctcagggcccaggccatctgacatccccccttgctcttgtgaccacatctgctccaacagtgaatctttcgggcaaactttcaaggcacagccagagctgggcagccctccccagggcaccgcagctgggcagggcccctgatgctccagcctctgccctccaccctcaccctcagcagataagccataaggaccctgctatagccgtgccagcctgcccaggcctgtgcccctcagcaggacacctgcagccctggcactggcctacaaggcctgacgtggtctgaccctgcccgaagcccagccccaggccacccatccactgccactgccccagtggcagccatgctggcctcctgctgcccgctggacacaccaggccccccttcccgcctccgggctcctgccttcctgtacacactccccggggtgctcttccgggacccttccccgcctgcccctctgacatcactggggggcctgttcattcacccccacccaggccttccctgacctctgacctctgacctgcaaggcgggactccaggccctgccccctgctccccggctgctccttccggcccccatgcctggcgctgggcctgtctccacattccctgggctgtgcattttctctctcccccgctgtcccatacggcgccagctacatgagcctcctgaagctgaaacaaatcaaagctgcactgactaaaaaatccaggtctgcaggggcaccagccccgtttctgagagcttggcagccaccgtggccagtgggagccgtgtgagacagggcagagcactcaccgtcatggcgtgttccaccggacggggcctcgtggtcagccccgcaagggcggggtgagcctgcttgtcccctgcttgggtccttgctcaggcgtccctgtggggcgagggctgtggtggccttgctgtcggggcttactgcttgctccttcattcattcacgccttaaaccacctgcagacaccaaggggaaagtctcgggggcctaggcccttctcccctctcttccccttctgccccctctaccccgtctcccccttctctcccctctcccctccctcccgtctctcctacccactgcggtctccctttcaaatcatggtggagtgggccacgggcagcacggccctgggccgtcaggggcgagggctatgggctctgactttactgccctggcgaggacagccgtggacatggtgggggccagaacacacccagctccgatcagtgcttggtatgggaccttgggagagtgaggcacccaccctgagcccacgttccttctccgtaaagtggggacagcaaaatgctctcctcttagggatgccttgagtgcagcatagagcccctgcagaagcttctggaacaccaggcagcctaagtgctgtgtgccggctgttactgtgaggctggtgctatgggtaaacgggggaactgctctgtcttctggctctgtcctacggcctgggggctgtcagatctggccacccacaccagcccttctcctggaaggagatggccctgtgcccgtgccctggtccgtgggtgtggggctgccgtgaggagggtgatttatggccacgtctgctgcataccctctctctcaccaccacaaagcacccgcatcctttacagagccgcctgcccaggcctgcagactgctccccacctcccccattgtggctgtctatgcccctgaccccagctgcaggcctggcctgcccccctcaaccctgcctggagacggcaggcaggaggaagtgggctgcaggggaggggccttgcagggggagtttggacaccacacctcacaccacgctctcccgctgccagtgggaagccgagtggctatttagtttccagaaaagtgctcagaccaggtagaagcttaaaacctcctggcctcctttatggtgagacatggggtctttagcggggcgtacagggctgggagaagggcctggcatcactcaagaagcctctgcactgggcaggtgcagggggcgtccctctgtccctcgctgtcgctggccggaggacaccagagtgggtgtcggcgtgtgtggcgagtgtggctggggctccggcttctccccatgactctgcagagccggccttgggatgtggggaaggggccgtgagcccaggaggtgaacctggaggagagccctgcctcagctcctgtgggccagcctggggggtgtgcaggctcctcaggggctcccctgggattagatgcagctgagcctgttctgagcggcatagactccccggccctgtgtccctaactggccagaaccacaaggggatgccttcctaagtccgggaggcactggggacatttatgaggtggcttctgaacaggaggacctatgctctggacaggactcacaaataccaaagctcattgtccccatcacacgggcctgtgcctgccaccaacgagcggggtccccggaccactgtggtccactgtcattccacgacctggtccccagtcctgtggggccccagagagatgggacgaccagccagcgtcacacagcctgtgaggacagtctgccagttcaggcctctggtctctgcgtccaggccctgcaaggacagatccccgtcaggccccgtcccaggccctcgtctgttacataattcgggcgtgaaatcccggaagggggagctcctgagcccgtccagcacccgggattggggtctccccatcacacacccttggtggcagggcctggctgggggcggcaagcaggttgaccttgcctctgtccaaggcgactggcatttgtcatgacttggggttggcttgagagtctccggaaacccaggtggctctgtcaccacctgatcctggccccaattctaggcaaaagggcagagccgatgggactgtggagggggccacccactcctggtggcctgggtgggctcagcccactggaggctcagagcagcgaaggaggccgtaccattctgcccgccccccccacccccggccctgcagcctgggagatgcccgggtctccccagggcaccctaggagccggctggcatggcatggaggctgctgcccggctactgaggaggcgcctctgtactggctgggctaaaaatagcggggggatctcgggcagggacagccggtgggaggcctgtcagggaggggccgggaggggcaggacagcagcctgagcccgggacccgccgtcaatggcgtgggtgctcccaccctgttcccggtggccgggccagccgcggcccagctgacaggctattttttcccctgcttgactaaatatggtcagggagcgcagcccgagggggccacttggccagggccgcgtgtttgggatgcttggccgggtatataagaactgcaaaggtgaggccggctcctgacccgaggggggcccccacgcccgctctggcctctcaggtcaggccctcccctcccctcccctcccctcccccgcccctgtgtctccgcgagccggctgtgtgcctgcgagagcgtgcacacccgcgggaccttcccttttgttccaccctgacctctaccttctctaccttgtgctgaccccgctggggtgcaggggttcccttcggaggaggccggggctcaaggtgtgcagctcggccgcctctccctaactctgcaccagcgccttctctctctctctctctctctctctctctctctctctctctcaagatctccctcctgctaagtctgcgctgctgcaggagggctgggggaagggcaggggtgtggagagggggtgcctggtgtcttctttctctctctgcccccaccaagtgcggacgcatcgagcttcggcccccacccctgcattcgcgattggctcccggaggaggtggctggtgctgccgccgctgcagcatctcctagggagccgcgaccctgcgcccgccgccgctgccgctgtcaccagcccggccccaggggtgccctgggctccgcggtgagtcctgctcagcccatcaccaccgctgggccgccgggacggcccctgcaaacttgccgggcaccgcggtggggggtgtgcctgccagcgaggtgggtgctgcgggtgccggcgccgtgcggctccggcgggggtgccgtggagttttctcttggctcgcggcatcatccacatttggaaaactgcagagccagcagccggcagggcctggagggcgcgtccagctgggaggcaggaactttgacttgcgggcattttgcaagaaagcagcggccccccacgcgggcagtggatggcatgggggcttcggggctgggctgggggcgcgattcacctgccgctccgcaacaaagccccggcagccgggcgtggggctaaacttaccttgaacttgcagtatcccccactgaggtgctggtggggggcagggattcccgagctgagcggcggcgaggctgcccccggccgggactcggcacttctgcagctctcccagccacgtcagggtcaggaggcgtttacaggggcagggcggcgaggtggggggcggggggcacatgtgggcggagactaggggggcttcggggagagcagccctggtggtcggcgtctgtgcaggtccctgctggggagcttgacttcccgcgtggcctcccgcggcgctgatgccgggggccgggcggtattcaccgctgaagagccccggaggaggccccgggcacaggagccagctcggctcacggtggggtctgcttggaggcggctgggtgctctttttctatgcagacgggaaactttttgaaaagtgactacaattcatttgtgagtgggcagaagtcctgtggactctggctgggtctggggtgactctcctgccctttgggactcccagctttccccttgacccccagaccccgtccagatgaatgcctcacaggtcgtgggggcttgagccaggctgcgggagtgtcccaggctctgagagctcatgtgccagggagctggggacgttgaggaggccttttccctggactccggggacggttattgcggaggtcttgggagggcacagatgagcggcggaacccaggtgcccccgaagttgaagctcaggctgcggtgtcgggtgccctttttgtatccttggctacgtgaaaatgataaatcacagcagctacgtggaaatgggacatcagcttctgcttctgtctgccatttgctccttcctttgtagaggggatgcctccagagccttaagcacaacccccaccccccgcccccacccacccccacgtgaaactccaacccagccatgcccagctgcagacccactgccacacagccacagcatgctcagtggcctctgcacactgcaggctctgcggagacattgccctgccctgggtggtaagagagaaccaactcgctccgggctgtcccctcgcatggacgggctgcctggaggagcaacagagtcatgttggacctctcttcctgatgaggacaacgggaggtcctttcatgtcccggggctgctgtcccaccccacgccagggtcagtggcaggacaggggccagggcccagctggaccccaccgcttagcaagcctcctgtgtctgtgcccggcctgcacccccaactggcgcctccctggcccccgtcccccccaggcacctgcaaagccttctttccacctctcaccaccgcacgtgccaggctcgccctgggccactgcgaggcctcgaaaccctgcaggcctcctcctcctcctcctcctcctctccccgctcccagcaggttcggggcggcttcccttcctgctggtgagggcctaaccttgaggtcccattggtctccttctggctctttctccacatttttcagagtctggcttcacggctggtcatagaagttggcagggaaggaggcagcctctgcttcccactcagagacatttttaaacgcaatgaaaaacatatcgatacaattaagtattccaaagtgcttagtttgccactcgctaagtttacttaaaccctctttaacaggctcattaggagctggtgagcaccgggaaattcattaacaggaaggcggccccctgcatttgactgtaaattggtattgatcaggggctggtggaggctgggcggctggccacaaagagccaggtgtgggaccagcctcccgggggtgccacggcagtggcgctgggcaggtgacggtggctgctgacccccggtgcccatgtaagctgctggctctgcgcagctgccgcttcaggtgggccgcactgcgcggcggttcagggtggtgacgctgcgaggcggggacgggggagagggtgaagaagagcgagagaaggagggagagaaccgggggagcgacgctccctcgcccactgggtgtctgctgtggccaggctgaggcacctagggagttgcccccctagtggacggcctctcaggagatcctgaccaccctctgggaacctggactcctccaagcatcgtctttctcgcctgcatcttcggagagaggtgctgagcccttcctcatggatacggggtcccgggaggcagccttcaccagggacctgcccaggaaaccagcagatgcccaggtaagcccccaggacacctctcgggtctctggtctgcagttcctcgtctggcctcaggagcaaggagttgtccagctcccggagaaggaggaggctggtcctgcgagtggggtgctgggcagggcgccccccaaggttcctctctccacccagccctctctgggcttggctgggatgaggtgacccagggggacaggaaagtgttggctttgaaagtttgggacatggatgatgcctccctgctctggggtgagggtggaggggcagcctgtctcttccatggacgcaaaaccgagctactgctggggccagggacaggcgctcgagactttctggggctcactgtccacttctgcctttctggatcgtgtgagtgtgtgagacagacagagagagatggattcagggatggaggggcgccgaggtcagaagggggcagggagtcctgggcccctgggggtggctggacaccaggcagcagtggcaggaaggctgtcctgctcacacagagagggctccggcagtagactccagggaagaagttacactgcctctgagctgccttctctacatcgcagtggggtcagcttctaccggggcggcgtcccggggtcttggaactgcatgcagactgcctgcttgggaaacatacttctttatatgcccatatggacctgctaagctatggaatgtaaagaagtatgtatctcaggccgggacctctctcgccgcactgaggggcactccacaccacgggggccgccgcggccgacagccagccaggcggctgtggtgggggtgaggctggggcggcaggctgcctgggcgttggtggacggtcgtgtccccgccagcattgttctgtcactttgcctgtgtcagcaggtggaagtgctcaccagacattaaatattcagcttgctgactgcggcagaggggaggcggcctccggcaggcgcggggtccagcgcggggctggtgagggctggggggtcggggccgtggctggaaagcacggagtggtggcggcggctctgggggctccactgatggccatcctggaagaggccatcagccggcagaaagggccacgtgtggccagggcagaaactgctcagaggcacaagacaagagcgagtttggaaaagggcaggtggctggatgcagaaaggagggagaggctgggcagcacatggtagagtctgcggagggaaggcacctcctgcacctgcatccagccctcccggctgtagggcaaggcagaggaactcggaggcatgtagcctccaaggaaggcgcagcccacacgagatgctggggacgcgggcagggtcagggccaccactgcccttaggccccactcctctgccgagggcacctgggacagggtcagaggagctgagtctgtgcagccctgaacccacagcccaccccaggggcctgggagccgttcgattttgccaaatgtctggttcatgccgccccaacctgtacccccaccaaagccccggttcagctttctctctgttccgccgaatccaacctgaggcatgttttgctgtgaatgcaggtgaggctttggcagaaagcagcgtgtggcccagggccccttgccccacctgtcgggggcctgagagccatctgctctgccgccatcccagtcctgacccgagaaaggactgggaggatgtcctggggcccaggggatgagggcaggtccggatccgtccgtgaaacccttttccccagtgctggtccttcaaggagaggatgggcggcgggttctggggtcttaggcagcggctgggctgctgtgtgaggggcgtttgcccggctcgtttctgagtctcagattggaggcgtttgccacctgggatgaggccaggtccctgcctgggcacccccaccctgccacaggcctcaggattaatttctggggtgtgtgtcctctctgccttggcactgctccagccacagcggtgcccctgtgccctacctcccgcaccctggccttcggcaggaatgaggcgggaagggacaggcaggcagccccctcctgcagcggctggaggccttgggtctgggggcagccaggtcacctgagcagctggggccagcatagggagcgctggataaagggattgggggccgttctgagctttcaggtggctcccacccctcagggagcctcgaggtgactggaggggagggcctggcagtcagggctcctggccttcaggtcttccttctggaaacttcgttctcccagcctcagccccatctggcgtagcagcaagggggcgggtgttgacctcgggcacagcctcctctcggcctctggacccggagggtcagtgcccagcatccgctgacgtcatctcttccctgcctgctcccagctccggccacagggagggaagtagccgggcgtgtggccaccgaggctgccggtggccacagacacaccgttcttttcccctagatgcggctgttgtacattaaagctttattgcaggatgtggtgtttaaataaaagcattagtgttttggaattaggtttgactgagcagtaaaactggagagttcacagggagagagctgcggcctgcttggcggtaaatcacctccagtctctgatctgctgaattaaaaatgagcattgcacggacaccgcccatggcagcccgagcccctctcccctgcacgtgtggcctgatggtgctccctggggatcctgctgctttcctggagacactgggacccggggctggagtctcccatgcgtgaatctctaaagcttggctcccgggcagcagccaggacgggaaccccaaactggcgtggggcatggacacgctgggactttcccctgtgggggtctttgtgcctgtccgtttgaaggaggggagagcaggcagggcgggggcacagaccctcactggctatgtcttgcccgcagggactctcctgagacggcttaggcacgctaccatgggggccgggactctcagagggaaatgagcctggactgggctgagggggctggacatgggacacccaccccctcgcctgccagctcgggaacccaggtgggtttgtgtggccatgaggaggtggccagtgccggtgtctctcactccctagagcaggtagcaccaggtgtaggcttctgggtttcccagaacactctggaaactgccccacggtgatcagaggctgggccaggctcccgctcgtggaaacagccgctgcagaaattgtggagctcataaattcagcggaccaaattagttacctttttctatcctatggctcacaaaagctagctatgctccaggcactgtttccacccgtgagtgagaccggctctgggtcctggagcttgcacgcaggagaaggacggtctttgggaagggacggccccgctgctgtgcctgcacgcgtgtgtcacgatgagtggtcttgcatttctgcagccagggggccgaggacatagtggcacccccttctaaagagggggcctttggtgattctggcttagtagtgcattcaagtgcaatacagtgttttattgcacaagcattcaaagcaggcgcagcggctggtgagagcattcgcgagaggtgcgtcggcagtctctgtgaaactgtcgggctcacatggggaacgttgcgtcgaagaataaactgctatcaagcatgattagattgacccacaggacagatattttagatgccgcagccggagtcaatcaaaatgaacatcactcgaattgcaaattttacccaaaaaatgctctaaagtaaaaatgagagaacctgagtggcccgagccatcttcagggccagggcgtggctgggcagtgctggcctgaagggtttctgggcagggatggccagaggtgggcggggcggtgcaatgccgtgagtcgctgccaccttcgcatgaagggtaacccagcaacctgagggattttgtgctgactcagccccgccgtgcacgtccgactgcagaggcctcccgtgctctctgcagccctgctcctgcctttgatgcccccgggcaggatgctgacctcggggtggctgggcttgggccccagcaagggaggctcttggacaggagcacagggctttgtgaggggccctggccttgcccactgtccttggccaaccagcagcctctgtccctgtgaactggaggcatcgcacccaggaagagctgggcatggcttttgggaagggaaggcacccgcagacagtatcagcagctcccagagcctcgtgctgtctgctccttcctgaggtcccaggcccagctggccagagcttggggctgggagggccctccccggaggcccctgggtgcccagggaggactctgcctttggggaggactctgcctttagtgctcagagtccccagccggctctgacccctggaagcccgtcctgctgagtggggaggggcggtgactgcagcagaggagtggggcaggctgctgccgagctgccgcctgggatgctgcagaacaccgcaggaagcatgcagggctgcgcgtctcaagggcagggatcagagggccacctctggcagctccaccgctggctcccttagatagagggacacagggccgaggttcccacacagcggtcactgcaaaggcactgtgagctcgactgattcacccaggtttcagaggcaccactaagcctcaggccaggtctgctccctgcaccaggcgggctgccccattggggtgcaagtgtgtgatgctgaaggacagagatgctgggggggacactgggcctctcaggcctcctgtgtctaccccagggagagaacatgggagaaagagccctgtttcaggagtgctgggtgcagaggtcactggctgctccctggccaggaggtggtcacccagaagccttggcggtgggagactggggtccactcctcacagggtcgagcgactccttggctgggactggaggcaggtgtgtgtgtgtgtgtgtgtttgcatgggcatgcacggaggacgatttctgggatgactgggacaatgacccagaatatttttaacagcggcaggagagggggtagaaggcagctgtccctggaacctgtccccggggggccccgtggggatgttttgaggttgaaggacgcccaggacagttgcaccgtgtggcgcttgttgtcctggcaagccgatgccctctgtcatgcccagatatggctccagggctgcatgtgtctccccagctgcccgcccgcccaccacgccagtataaatagtccgcgttctcagctgtcccatggagaggctgaactcggatgactctgccggagctctaggagtgcccccgaccccgcccactgcctaagtgcctgaggccagcagctgtagcgggacagaggccgggtgaggctctgggctcttgggctctgcctctgtctctccctcctcacctgcccccttggagggtgtcaagtccaggagggacccagctaccttctgtcgtcccttccccagggcatggcggggactttgcccactgagagtgaagagggacaagaatccccaccctgggagtgggtgcagggagctgcttggttccctggcctcgggctcaggcctgcagcaggcgagactgtcgctggggtccctgctgcccctccctcgggtacctcctcacctgtcccggccctcctcccacatcagctgtagcaacacactccagaggccttgcaggcccgagcaccagcttgccaggccccttcccaggggaactggctttccctccacccttaactcaagaagtgactctctaatggtagaatttcaaacacctccaaggcctgtggagctgatgcccttgagtgtgggcaggaaaggcccatcctgtgttccttagacatggggtgctgcaccccacctgaggactgatgaggacatgtcccgcaatgtctctgcacactgggtggcctcactgagccagagggagggcagggaacaccggcagaatcgagagcccgacacacacttgtgcgtggagctggggccttccttggtgtcccaaggcctgcggtggccacatggatgcccctgtcatttcatctgtggccatccctgaggtcctggcttagggatctgtttctgcaggtgggcaggagcggtgggcaggtgccctcccacccacaggagggggctccaatcagactctgtgcaccaaatggcttttccttatcctgggacacgtggccgttcatttgtccccgagctgccaagccctctctcttgacctcgggtctctctgatcctgttctcagccaacagccttcttcaaattaaaccagcttttaccgcggccctatttttgagatcataagacacaaaagtctatcttgccatttttgcaaagaacagctaaataatcatgtgtcccctcccgccctgcctccccccagcctgccccctgctctgtgggtctatttgaggcgaaatttatctctaggaagggacccatcaatttgccttgctcttttgttgacaagtttattaaaaacccgggcaactctgtattaaacttttatcagtgttgagaaataatacatttctttttttgaatagatagaaaagttatggatttgggctgagcgggtcttgttcagcatttggctgagtcagcgttgctgatgataagaaacaagccgttttggggtgcagggtttcctcttgccttttaattaggggtctctctgcagactgccctgtgagagccagaaccccaaaggctcctgcagaaaccccaacgggggctgcccacacacaccaggctcactgtaattctttgctatctattttaataattaaccaaaatctggaattaaaatttaattcagtggtgaatctgagtgctaataggtaatggtgctgcatggagaaatattaggttattgacatttaaattttaaaagcttcatagcaagaaacaaaaaaagcatccagatgggagttagcaatgtcctcccctggtgggaggggaggggcccctgtcctgccccactgtgagtgcaactggggttgaggggggaggaggggaggggcccctgtcctgccccccggtgagtgcctgagattgtgggggagaaggagaggggccacccttgccttcatcttgggtccctgagtctctgtgggggctttggcaggggcagggctgtgctctgcagtctctgagggcagtgtctttgctgcgggtgtgacctggtgttggttgtccttgaggggaagtcgtttggtgccgcatcttcaccaaggacgctggttgtagtgtcccctgtgctggggcaagagacaccttcccctgggggtcctgtgtggtttctgcccaaaatggccaccgttccccgaggtcctgggtgagggcttttgggtgcagcaggagggactgttggcttccaccgcccttgaggggcaagtgcccagggaccccgggccaagctcagacccggccatggcatgaccaagattcaggccacacggggctggtgcttacacatggtcattcacactcccacatggaggacctgaggcgcagaggggctgcagaagtccccaagaacccctggctaggtgtgtggcactctgtgcccggggtccccctctgccccaccagatgtcgacctggggacggctgcggctgcaggggagggcccggcggtgcgtttcacacttgctcctacttccgccttccagggctgtggggctgcctcccctctagggtccagcgcaggggctggggccctaccaaaggtaggaggggcttccgggataagatggcaggcgtggctctggccctcctgctcccctgtgtcctcacccctcgggggtccgtgggtgaggctgctgcagccgtgagtctcagtgacacttcctaccaggtctttatctacaccactatttgctccaattataactaattggacacgtactgtatcttcatggcatctaattttgtattgattttaacagggctgccggtgctttcggcagagattgcctgcaactagtatccgtcgctgcttaaaaatgctgagtgtacttccctgtgtgggacaactccatcagcagatgttttaaaacctgtttaattgtttggttcataaagtgcactagcggtaggagctgcagccttgttctctgtagcactggagtcaagagaggggcaggaggacccagagtgggttttccggagaatccacatcccaggctccaaccccagttctgctgtcctggtgaacggtaaagtcaccagaaacgcctgggccacctctctgccaggtctgggcacccagccggggacacagaggggaccagccaggagctgcccctcccttggcgagcttgcctttactcggggggcgcagggactcctcactcgatgaggaaaccacagtggcagctggccccagagaaggccaggcagggctggccctcccctacccggaggctgctggagccctcggggcccggggatctgaggccccaggagctaggggcggtcgctgtggtgaggggatgggtcttggcaggaaggcagcccatgcctgggaggcgggaggcagcacagctcagtttggggaaggcaagctccaaggccggagagcgtggggtgcgggggtctaggaagggtgagctctgtgaagcacctgacctttgagccatggggcccttggggaggttttggggcttgtggggtgttggtttcttggcctttttagagagaaaagaaaaaaatacttacaaggaagttgaggagcctcagggacctcccttgtcagccctcgccccatgctggtgagaccccagggttcagaggggaaggggctagaggatctgccagtgagtgggagctgctgcctgagggagcagagcagaacaggggggtgcccgggtccacaggggtccccgacgtcctgcccgaaggatggacctagttccggcacgtcccaagaacacgaattgtgggcctgttccttcacatttgcaagaaaaggtgttgatcacacccttggcaaagaatgactgggaacctccctaagccaggccacattggggtgagggtacctggaggctggctgccacctcatggggcagcatgaagagagaagggcctgggccccggggcaggggacgctgctgtgagccccagtgtcctcctgaggggcagcacaggactggccttgaggtacagtggggtgtatgggagaagacggtggctgtcggtgctcagggccgcacctggcacttggccgctcggtgtctattcacagctcacgcccaccaccgtggcggctgcaacgccaagcttgatgcctcatccaaggccgcagtggcctccccgtgggggttttgcagcctgccccagtgctctgctgcctttcgggtgaaatgaccagtttgtttgctatgttgattggcaaatgccagacctcccagctcctgatgggatagaatcgcggctgggactcgaatccccggcttgatcttgtcaaatcttctgctccattaggaatattgacaggcgataaatggacaagtgtgtgccggcttcgaggtctttgagccgtcctcactccagggccagggaggggtggactctgggagccttgaggtctgccctgcaccctctgtgctactggagtaaggaggagagaggtttgcagagtgtgggctgatggcccggaagcctctctgttttggggcgcgaggctgagaaggctggggcccagccccgacttataggggactttgaggaggtggtcctcctacacggcacagatctttctggagggcaccgtggcagggacagtcagggaaggcagctacggacgggtcagagcaggcctggcagaggctggggtggggggtcgtccagctcagtcactcccagaggggacttggagcgtgggcatggtgctgtgcgaccgtcccttttgcctgaggggcctgagcttctgtccctgcaatgtcaggagggggacagaaaggccagaggacaggcaggcagggcagccccaggtgtgcaacgggcaggcaggtggcacaggccctagtgcgcagcgcccactctgccaacctggtgggcgaggagcaggtgcgttcacctgtgctgcccaggacggcctgtgctcccggatagaagctcacacacatgggtgccacatccccagcactgccggagacactctccctcacctgtcacggctcctgatgaacgggggctgcagggagactcattttataaaagggaacttgctctcaaggcactgaaggtgacattggtgtgggggacgcgggagccaggcaagagtgatgtcacgttcggacctccgtcctgacactccatcctcacagttcccttgggcatggaaatgcccctcagcaagatgcgggcagggctgcaggtctggggcatggggcccagggtcaggccacgaaggccccctcaggctgtcctcccaccaccatgcaatgtggacgtccctggaatcttcccgtcctgcctacccagagataccatgtggtgtcagagtccatcccgtcccacccaggccatggcaagccaggcaggacggggtcctgggtgggctgccccatggttagccagggcccaaggctcactgggaggtctgtcctgcctctgctccagctatgagcatggtctgggaggagtttgcaggggaataagggcctcaaacctgcaagatcactgtgcccacagatgtgagccccctggggcggggcccgatggtctgagctgtatcccacagctgaggctagtgctgggggcagtgggcacttggtgaagcgagggctgtggaggaatcgggcggtgacaggcagagagcagtgagtgtcagttccagagcatggaggccgcctggcacccccgaccctccccagacccctgcgggtccccgatgggggagcccgggcagagcgagagggtggtgagttgcgtgtgagcgggtgtgtgtgtctgtgtatgtctgagtgtgtgtgtgtgttggggcgtgtggcccttcacaccagtccctgcagagcttgagggaaactccacggggtgggggccctccgggagttggggtaagggcctgatgctggccgcgaagccccatctccatcgggactgcttggtggagccgccttcttcaccgacgtcgctgttcctcggatctgggagccaaatgctttgctagagctggtaaaatggaaccaaatcgactgtccaatggatttggtccccttcaaccagctgtagctgtgcattgatggcgccgtgcggcccggccgcaggtcccgcagccgtggagaggacccagcaggtggcgcggggagagcccggctcggcacgtggtcagctccaagtaagtgaagccctgagtgccgcccccgcccccggaacacttcagtgcagagcccgagacccttccccctgaaagtgggtggctgaggaacggggtcatccccacagctgggtgctcctgcttgttcctccttgccagggcaccatgaaaccaatgttcattgctcacacaagagctttgcttgaaaatgtgggcttaggagctgggccctgtgggttgggcctgccgggggcctgggctggccccgccctgtcctcttcccaaggacccttcttcgatttctcctttaaaatggcctggactctaaggcacctccagggacccacaggggtgagcacggatgctgcgctggtgacctgtgggggtctgtgtcctcagtggggaggcctgggccggtggcatctctccagatggcctgaggggtgctgggcctggcagggagactaccaaacaggagcccctcagcatggcccgtggctggggaggtgcctgtgaaggttgctggggcccccaggggctccccatctccccaccctcttgcgggaggcagtgacgcccatgtgcagggaagctgggccatcaacgggcacagctgcagtgagcagagatctgcaagggggtctgcaggccaggtggcacccaggacccattgtgggggtccccgaccatgtgcccttcccttggcaggggctggcatgaaggggctcaggctgctgggcgccagcagattggaggcctgggcaggcacgggggctcctgctgggcatctctaggcctggggttccagggcctgtcaggagtgacccctgacttctgcccagagttgcagacgtggggcctcccctcaggggccaccagctgccggccccagggcaggtgaggcgagggtcaggaccctgggagggatgagcagagggaaggggcatggtaggcagaagggcagacaccccctggactgatggacggatagaagaccaggtctgaagacagtggccctggctcaggaagccacggctccctcctcacaccctgcccagctttagtgcctctaattcctagggtcagcttaaccctaaccttggcaccgtgttaccacccctcttcacacagagtcgctatgtccccagatagtgggagtggccgagaggctggggtagtggacggcagcccagtcttcagcacagggctggggctggagtttgaagaccagagtgtgcgggatccatgggctctgctcccgaagggctgcatggcctcagcctttattcaagcctctctgagtggagggcagagtggtcagcccctgctgggggtcctggccaggcgccgcctcctgggagcctccgggggcttccactgctgagccctttacagggggcagccggatggcctgggtgtggccgtgcctttcagggtggcctgaccccaaccccaccaaccccaagctgtgtggtgccggggtctcctgccagggacatctgtccattgggtgaggcctggtcctgtcctggaggggagactttggacatccacgcagccgaggacctggtcggcctgccctcaaccttccctcctacctggagggcggtgaggtggctggggtgcaacagcttgaggtcctctgtcaaatacatcacccgggtgaggactcagggaaccactcccgggcctgtgggagggatttgtgcaaacatcatgccaagaacagtgtctgttgttgacccagcacccgccagggaaggctggagccactggagtcccttccagtgcagcctggggttcctgttggtcaccacgccggccgtgaacagggacgcctgctccgtgttgcccgcctggcccttcctcgccacccacggccccgccagcccgaccctctggcactgacacctgctgagggcagtgatgcagctgcagaaagcccacagctgtgtgggagctgccctgccaggcagggcctcggggtaccgaggagggtggcaggaacggaggggaatgaaggctccgtcccagccagccgagagccagggcctcctgctcccggcctcccgtctctcctgtaaattaaaggatgagatgaggctaagaccatctccggtgctccaccatggtcaggacatcagctccagatgactgtaggacactgtggctgtttcctggcctacccacccggggcatcttcatggggtccccagtaaaaaccactgcacccgccttgccatccccaggacggggcctcgtccactgaaatcacagtgcagcccggcacaaggccacgcacagtgtggacagacagggcatgtggatggagatgagggaacacttggaagcagcccccatgcctggcgggccaagcacgaggggccacacgggcgctgaccctaagcagccccaggcaatgcatgaccgcggccgggtgtcccagtgaaactttattggcggacgcgggaatttgaatacgtatcattttcatgggtcacaaaatgggtcttttgattttttcctcctagtcgttaaaaaggtgaacgctgtcctgagctctcggggctgtctgaaagcaggtggcaggggggatttggccctggttgcagctgccacctccaggctagattaagaggatacatgagcaacaggtgctgggcacacagggccggggacacagggtcaccgagggcggcactgctcctcccagctccttgctgcatgtttggtcagtgtgcaggtggaggccccagggcagccctagtgttcacagtggtgggaccgctatgaacagccccagcctgcccagcaggagagaaaaaccaggaggaggcagctggggcaggacagagcctggagcctccaggtttggggtggggctgtctcatgccacatcccctgctcccccccgcagcctcttggctttgggctgaacttgcccccagcagatgcccatctctggagcaggtgcccactgggaacagggcccagccaagccaaggctactccccagggtcaaggaagtggggtcagggatgggacacagcccactggaggaccgcagtttcggatcccaggatcccagcaacctcgggttggggtgcacgggagccagctctgccaggctgggcatgctgcggagtgcctgggcatcagagagggtgaggagctcaccacagtcacacagccagccctgggcgagcccagagcagaatgggaacacagggctgtctgccccagggctgcgtcttcccctcaggaatgagcggcccttggctggacttggctggacttggctgggctgagtttgggaccctgagtttgggggctcctgccttcagtgcccgcgcctggtctccatgctttgctgtgtgtttagctgcgtggggggtccctggagcatcttgccttaggggctcaaggggagagggggcagcagaaggggggcccatgctggggaacgggctttatgtttcctggcgctctgccatctgtcttttcatctccctgggaggggtgagaatgtggacctgagtgagcagtggacattgccagctcagtgaccgagaggatgggtctaagtgtccggtgctgtgggaaagcctctccccaccaggtgcaaaggtgacaggagttggcccatcccaacctcggctgaggatctgcagatcctgggtcctgtatcactgtaagacaagtccaagagctcattagaaatgcagattccaggccccgtacccacccctaccccagtcagagcctccagagcaagggcctgggaacctgaatttttaccgagtgtgtttggtgagtcttatgaacaagccacatcaacctggtcctcttgatgcctgctggccccgcacctgccctgcgtacaccttgctcaggtcccctccctctcctccctacccctcagcgggccatctcctctggaaagccccccggcctctcagcagtacgtctctctcctctatactctagcagccgccatcacactcgggaccctgttggctgcagtgggtcactgtggaatctcccctctccccgcagccttgggtggagggtgggaggtgtgtgcagtttcccagatgtcaagggatgaagtaacgtagtgtgtgtgtgtgcgtctccttgttctgggagaaagtggtgttgaccacaaacaagcagaaagaaggttaaattctgcgaccccaagcagcccctggtgagatgccaggcacttccttccagactttttttccatacgtagctcagttcatccccatcccacctcccaccacacacactaaggcagcggccacagggctgataaacagccctttctgcagagcagtgcctgggccccctcctgtatcatcagtggctctgtccaccttcctgcccgaggtcctggggtcaatgcagtgccaacacgccatccatgaccaatgcgagcaacctcactgctgtccacaaatgctcctgtgccaagccctgggcacaacgttgtccaaactctgctggctctgacatgcctgtggttccatggcatcaccaaaaacatcctgacttccttcctcctgagcatgggatggaggcaaaggcctgagcagcctcccgtgggtcacccaccacgcctgctgcgcccaccgcacctgctgcgcccaccgcacctcctgcacccaccacacctgccgcccctgccgtggctcccgtccctctgcagggccctacttccctctcctcagcagctcgctcaggcgctgtccatctcccaccccagcaccctgtccctcctcaggtcctgctgaccgggcggcctctggtctgcagcagggcacacgggccaccaagcgctaggctgtggggtcgcttgtcgaggttgtctctcccagccccttgctcccgtgtccgtggcctgggacttcctccaggtgtatttgtggaggaagccagagaacgggggcagggtgtggacaagcctccgagggcctgaacaggaggcggggtcccaggcagaatggccaatgcggcctcccaagtttcaggaacaacccgtgatctggaagctttggaaactcttgaagacaaggagcaatgacctgggttggaccaaggattccagatccctgctctgctgcctccagtgggaacacccacacgccctccccaggacccctgggccgaccacctgggtttgtgtgtttcagtcctggatcttgagcccttagaagagaccctgctcccaccccggccactccgtctcctgcttcctcactttgtgtccacttgtcccagcgtgctgggggcgaggctggtgctctaggacagaattctggtcctggctcctgccctgggtttttttttttcctgtaggtcagccctgaaatgtccattactcacaaagaaaaggaaaatgctcatttgaaagaaattcttctctttgtcaatgctgaggcattctctcagccccagccccacagtgctccagtgtgtgaagggcaacagctgacggggaagttcagcacatctgtgctgaccagggctggaggcgatgccagtccgtgcagctgggaacgcctcctctgctatggctggagccactgctgaagggactccacctggcacctatgccaccaatggcccctgaacgggtatctaggcccacccttaataaagatgagctgctcattcccagtttcagaccttgtttatcctccccagctccccagtgtgttctgggggagatccctccactgtcagacaaaaacttcagaatgacagcggtcatgccaccgagcaccagcagcattggcatgtgcttctcctcgtcagtgcgcctctggctcagtccaatgccaagcacttacagctggggaaacacacacaagcacatacacaccccatacactggcacaggctcacatgtgcacacacccacacatgtgcaaacacacacacgtgcaaacacacacacagaggcacatgcacattctcacacaggcacacacaatgcacacatgcacgatgcacacacaggcacacacgtgcacacccagacacatgcttacacatgcacttacctgcacattcccacacacggacatgcaggcacacccctccacacacacataaacgcacatgtatgcacagcttctcacagatacacaaagcaatgcaggtactcatgtatgtatacatgagtacacatgcatgcacacaggcacacacatgtgcacaaacatatatatgcacacacccacacatgcacaacacacacacataggcacacatgtgcacacactcacatgcacacacgctcccatccccccaccacacaatcacacagacgcctaatgcctcgcagcaggtgagaccacccatcagtaggattaggggccaacagagggttccggcagcagacgcaggcagtttggagaaggggctgggtgtgagctaaggcagacaggggaggctgagtgagggaggaggttgggtccctgaggtgggggagggggatgggtgggaggtggctgagggagcttccctgagaagctcagaatgaggcagtcacatggggggttgtttgggctttcccaggtgaaccctgtgcttcccccttcccttccctctccctctgtgttcccctccccaaagctatggcccctcaccacccctctgccctggcacctcaatgagaccctgtggaagttcctgtagacaggaagtgggatgggacctgtggggaggtggggcctgtggggaggtggggcctgtgagaaggcggggcctgtgggaaggcggggtctgtgggaaggcggggtctgtgggaaggtggggtctgtggggaggcggggcctgtgagaaggtggggcctgtgggaaagtggggcctgtgggaaggcggggtctgtggggaggcagggcctgtgggaaagtggggcctgtggggaggcagggagccacgacagcctgccagctttgcctaactttttataacagcttgattttaaaaatgtttcaagtctgtttcagtctgtaggtccctcctgttgctctctctttttttttttataatgtgtctgctgaaggaccaggtcgtttggcctggggtgtgtcatgcatcaggattgctggtggcgccctcttggtgcagttctgcctgttcctctgtcctctgagcttcctgtgtgctggtggctggacccggagactcctcccactcaggctgcatccctgcagcaggaacccaggttctgttttgtccccccatcaggaggacacaggtcagggctgtgcactcctggaatggtggccaggcttgctctgtgcctcaagccactaatccatcaaggttgcaagacggtgatgtcctgagtctggaagttctttttcacttatttgtcgggatacctttatggaaactcttctcctccacgcagtctcatccccagtgccactgtccagaggaagcaggataaaggcacaaatcttctcctgcagccgccgcttttcaggaaaatgcaccaggtccccgaagccctcctgaggattggcttgctcgataccactgtgcgcgcaggcccctttccagcaggaactgtggacggcatcgaagggaagagaaggttcctgctgcaccagaagccccttatggagcagtgaaggatttcacagaactaaagatcaggtgcctgagacaggagtttttaaaaagatgctttgaaagccaagggggaagctgagttatgagaaagctttgcaccaccgcaaggaatacagagcccagagctgggatccgagtcactgtggcactgggacagaggcacttcgtcgtacgcacctgggagcccagactggcctggccattggcagcagggggtccccggtgtgggcttgcagcttgttcacctttactgtgtcttcaggggcacatctgtccatctcagcaaggcttcagtgaacgtgccttcaggacgtggaagcagacaccgcactgtgtcgggggcctgaacacgaagtcggtagaggagcaggtctccaggcacggctccggcaacaccaacaggaagcgggccaccttggagagcgctcttccactgctggagttcctggtcaatacggcatcgtctgcgtggagggtctgatgcatgagatctacgctgctggaaaacacttcaaagaagcagactacctcctgtgggctgaagttctcttctccaccaggtgaaatgaagaaaaagcccactcgttttgtagaaggtaggggtgctggcagccaggaagaccagaccagcaggctttctagcagaatgaactcaggtctacatcattatttttgtaatctggtaagttaataaatggtgactgcctttgaatttaaaagaaatatgtatcattatggattcatgaaccgaaacgtgtttggtaggtctcagtccactgcaattattatcatctttgcagctcagatcgtcctgtctctggccaggtgtgtctcatcgggtggaccccacgtcctgcgtgctctctcagggtcagcttggttgtcatataatttacatacaaaaaaaatgcacagattttaagtgtgaagtttgtagagttttaacaaatgttgagttttacactcatgcaaccaccatcacaaccaagatctggaagattccatcagttcaaaaacttccctcatataccttggcagtcatccccttcctctgtcccagcaatcatggactagccagcatggatcagatctgtttcagctggaactttctaaatggaatcatgcagtgtgtgggctgtgtgcctggcctctttcaacatcattttaagactcttctgcgctgttgtgtgtttccataggttttgttccttttctttgctgagaagggctccattctatgacgacaccattggcctgctgatgggcattcgagagtctcagcctccacagggtgcagagggcagaggcagggctgcaggagccacatggggctggttgctgtcactcctgccatgctgggttggctggggatagaaactcaactcagaagatgaatcaacttgcttatgtggccaagaggtctgaaaatagggctggatccagaacccaaaccatgtcatcagaaatctttctccatagctcagctccactttccttggggctagcttcactcctggcaggctgtctgcaggcggagcaaaatggacactgagatttcaggcttatatatctaatcggtgggacagagagggaggagagagggagagagagagagagaggtggagggggagagaaagatgcagagagagacagagagaaagagacagagagtgagagacgcacagacagaaagagacagagtgagagaaagagacagagaggagggaaagagacaaagagaaagagagagacagagggaaaaagacaccaaaagagcaagcacgagagagattcatttcaagaaacccagcaaaggtcccaagatgggcactcgctggccaggcttgggtcacttgaccacttggggtgggagaaagccatcccctagaactacccaggctccccggattgaaaccagggacctgataatgaaaggaggagggacgctgggcaggcagagtgaggccaccctgcaccgttgcctccacagtgtgctgatgccaggccccgcgtgagcgtctgtcacccaccgtgcactgccctcccacctggtgggccgactcccgcagccccgccgtctcgatacagtggtgggtgggtggtgagctgctttcctgtgctctgaccttactttatttctaagagtgaaaacagaaagacgtgagtgccaacgccagcgacagaaagcaggctctgtgaacagcgcagaggcaaggctggcactgcccaagctgcccgggggacaggcacgtgaggcaggtatggcgctgtggactgcagactgggacgtttggggccactttcctatagagggtgtatctttatagcagctgtaatacacgtttcctcattggaggagaagacacgctgggtgaccatctgtgtgtcaatgtacacagtcaattttgtacattttccaggattgcattgtggacacagtgaaagagacccctgggagaaatgctgcgttcagtggagactgaacccaggtggggggctggggggtgcctcctgtgactcggggcaggtgcctgactacctggggtgctttccaaggaaggtgggcaggggcatgaggagggcccctccagggcctccgtacctaagtgaagcttcgtcaataagcttctcgggagatggccaggggcaatgagggagacaaagggagctccaactcaaaacctgagagaaaagcaaatggcgaatgtgatttcataaaaatgtttcactgacaaatcacaaggcttttcctgctatgggaaccccattcctcagctctccccaccggaaaagaacctggtggggcagggtggggagacccagtcccacacgggaatttctgggtggagcgtttccatatttttcacaccagcaggtggacgcagcagtgagtaaatcatctgcatcttttggacgtgaggctgcacgtggcactctgtggataatgcatgcacatctgctcatcgcttcttttttgcaaagtgcgcctgtcacccataaatccatcacatccacggccaaaggctccttcagaacgagccaaattgcagtttcaggtgttgggtcttctctcacagtctctcttgcacgcacactggcttgtgcacacagggacctcctgaccgggcccggggcggttgtggatgtgtagggtctttcaggagagcaaagctgacttgaggacagacagcaaagcagtagcagcaaagccccgcagcccctcggagagttcttttcattcccggaaccaagagtgggaggaaatggcccctaggaagtgtcttattttctcatttgttagacgccgctgtcagcctgggagagcaggcactctctgttgtgaatcagcccagttggatgagctcatgctgtgggggctgcagcccgccgcccctgcacccactccattagctgcagggaggtgagctccgcgaggggcgggccagggcgccacatcagatcactccccttcacggaacccagtctaagtgtgggatggccctgtcatggctcacaccaaataaaactgagtccaggacagcgctgtgagccctcaccacacccttagctggaggccacaggtggcggggctcaggtccgaagcccttcagcaaagtcctggtgtggggccttggagaagccaccaatgtctcaagcctgctctcacctcctcatgggagggtcaggtggggccatgcagttgaaagacatcaacattcgccacccgcacaagcggcctgggcagaggctggctgcaggcccctagtccccacctctgctccttctcccagcctggcctgggtagttgtggggcggggagtctgaggcagggggtgccggaggaggccgtgcccttgagatgctgggagagtgctgatctcccgctcctggatgtgtggccgaggcctcctgagtgtgcctgggtcccgcctgcctggggccaccgtcagcctccctgatgcttcgaacaccatagctgcctctccttcctcgccgttccctagaggaaagtccttctcaccctgtgcaaggagctcttggtttgggaagagactggacaggacccccaatgacagctcagtctgggaaggcagccgatctttctcaggcctgggtacaggtttatgtgggatcctgggcacaacatttaccttctgcacccatgggaaacctgcccaggaagcatggcccacaccaggcagagtgcacacaccatttttattaagcagagtggcgagagcgcagtggctgtgaggtccttccaggaccccgcttgtggacagctcccagcagctgcagctcactcccagccccagctgactcccagaccctcagtgagccctgggctggatcaaagtacagggacgatcctgtgggtgcaccccagcatggcaagcttccaggagaccctagaccccggctgggggtcaggaaggctctcgcctccgtgcttctgagtccataggaattgagtctctggccacacgaggacagaatcagctacatctgaagaacctggagctagaagatgagggcaattaagtcatgcgcctcggcaagttcattaaaatgttgacttgctaatggtcccgggtgcaatttggaatgagggtgttaacatagagacttggtctattcgggaactccctggtctgaaaatggagctgccaagcttctaatatgccctccacagactagagctccgacacatgaattattaatgccgcatcatattaattgtattgatatgttaataattaacaacaatatgctaatgattgccctgtggctacgtcactgctgctcacacacgtcctcccgggaggtggcattgtcctgccttcggggagcaagggacagcaactcgcccaagggcagctggagggcagcagggctggggctggtgcccggtccctggggactggggtgacgtgcaactcgccaaagaaggtgcctccgccctgcaggccctgagcacccggtggcacctgatgcaggccccgcccccacctgctgtgtgtggaggagggagtacgagggctgggcccagccaggcgtctacctgagcagagaagcggctatagaccttgtgcagaggtgtccccgcggtgacagagcacaggacagctctgggccgctagcagtggcagcccaggaaaggggccacggctcaggctggtcctcttctcctggtgacaggccccgagctgttctgtgccctgggctctgccttggttttgtcatctgcagaatggatgcggcagccccgtcaccttgcaggggagctgggacgggcaggcacacagcacttggcaaaagcaggcacccagagtagctgttattattattgccccctaagggttttgcttaatttctttccttggaaagtgctggaataaattctagacactgctgcgttcccaagcatcgctcccggccccaactccacagcctgagggctgcattgagccaggcggattcagcacccctaggaagcctggcactgcacccgctggctgcagtcgtccacggggggtgtcagcgggtctccagctgcagaccgcacagtggagcttgggagaattaattttttctgagaaacccggaagaatctccacccaacctgccctgaaaagtctctctagcacctcctctggtgtctggtgcccattagcaccaagggcctccccgggggacaggagagcggggcaggtccacgaggcgggttcaggcagctcaggcaagaccgccactccacagcctgacctgcagccccgcctcctgctggggcgggccatgagcttgctgcacaagtgaaggtctgcagggggtgtctttcggagcgcaccgtgacagcccagcagaagaggtcccaggggagtggcaggcgtcacggccgtgtggcccagagccccccacatgtgtgagactccacctccacggggacccttccatgcaggtcactgttattagcccattgtacagagtaggatattgaggctacggcaactttcgtgacttctgaggtcacgtagccatgaaatggctaagctgggcttcaaactcaggcagaagattccagaaccagcacacagccaccaggcagccagcctccacctgacagccggagaggctggacatgggcctctaagtgccctcaccagcccagacctctgaccccccagctctgctcccttcccttcctttctcttcctgtcgctgtctctgcttccctctgtctctgtttccctgtctctgtctctccctgtctctgtctccttctgtctccttgtctctgtctccctgtgcctctgtccctgtctctctgtctatctctgtctatctctctctccctctgtccctgcctccctctgtctctgtctctctgtctccgtctgtctctgtctccctctccctctgtctctctctgtctccctctccctctattgctgtctccctctgtctctgtctccctctccctctgtctctctctgtctctgtctctttctgtccctgtctccctctgtctctgtctctctgtccctgtctccctctatctccctctccctctgtctctctctctgtctccctctgtctctgtctccctctccttctgtctctgtctctgtctccctttccctctgtctctgtctctctctgtctctgtctccctctccctctgtccctgtctccatctccctctccctctgtctctctctctctgtctctgtcctgtctccctctgtctctgtctctctgtctccgtctgtctctgtctctctgtctctgtctgtctctgtctccatccctctgtctctgtctgtctctgtctccctctccctctgtctctgtctccctctccctctgtctctgtctctgtctctctctgtctctgtctctgtctccctctccctctgtccctgtctccctctccctctgtccctgtctccatctccctctccctctgtctctctctctgtctctgtcctgtctccctctgtctctgtctctctgtctctgtctgtctctgtctctctgtctctgtctgtctctgtctccgtccctctgtctctgtctctgtctccctctccctctgtctctgtctgtctctgtctccctctccctctgtatctgtctctctctgtctctgtctctgtctccctctccctctgtccctgtctccctctgtctctgtctctgtctctgtctctgtctcagcgactcccgggtatttattgggaggcccctgagcacatggcctcagtccctctctgggacatctgcagggccctgtcccccttgcacacacgctgggacaccctcggagcccccggcttactgcacaccctcatgtcctcgaccttcaggggctctcctgggtggcgtgacttggccccgagctgagctggagaacaaaagtctttggagctgcttttattccattttggcagcttccaagaactgggcctctcgcccctgagcgcatctcccgggaatctcggcaagaccctgcagtggtgtgggccctgccagcctttgtcccatgagtgaggtttgctggggaaaggagggaccatggaggacttgggctcatttagagaggagaggcttgtccctggaggacacttttaacctcagcccttggcagagatttccacgaaattaagcctcaggctaatgctgtcaacatggggagggggctgcttctgccaggcccacccccatggggggcttctgcacagatccagttccatgccagtcctgccacagtgggaggggccttggggcagcatcagctcatcccagtaccagcagagcccctgcccagcaaccctgtgcctcactcacgctgtgtgggcaccatggggcggtgggcagcatggctctgcgcccctgaggcagcacctgcccttgaggttccacaccttgtgggggtgggaatataacaggcaaatttgctgtggagcagggaggtgggagggctcaggacaaagagagccatctggggatcccagtgacgggtgggatctgggagcggggaggccctccaggaatgggcaaggcatggtagcaggggtgagagcaggggtggtaccaccagggttgagggtggcacccctgcagcctggcgcctggctgggccccggcacccctgctgtgcaggtgacctctagaacatgggcgggaaaggcgccctcgcgggctgtccacaggggagggaggatggcgctcagctccctgcaggagggagagatgggccagtcaacctggggagctctgcacggggctgacagggaagcctagtccctcctcaacccctgaccctgaggcctgtggatgcccaggcccagctgcctccccctcacgggcatgccctccctgcctggacgcatccctaggagggagctcctgggctgaggaggctccctcggctggtgtccgcaatgacagtggggacccggtgagtaaatcttggcacagccacaccagggacagcagtagctgcagcgcttgcggagggtctgcgtgcaaccccttggggttgcatgccccccaccccatgctgggactgcatgcacccccccagcctgcgcgcacccccccaggcttgcatgctccccacctcatgctggacctgcatgcaccctccaggcttgcatgccccccaccccacgctgggactgcatgcacccccccagcctgcgcgcaccccctgggcttgcgtactcccccaccccacgccaggtccccccacctcacaccgggcctgcgtgcatcaccccccaccaccaccacccagcctgtgtgcgtcccctgagcctgcgtgcgccaccgcccccccgcacccggcctgcgggcaccccccgggcttgcatgccccccaccccatgccgggcctgcgagcgtcccctgggcctgcgtgcacccagaggctgtgtgttacgtgctgtgggcgattctctttaaagcagcaacaattacatgcaagtttgaatgaaaactgctctgaaggcttcggagaaactgctgaatgaggctatttgggggtggggacaggaggagtcagtaggtttagttttattccacacttttcttgatggtgggaatgtgaaactagctgtgagggctgctcttatttagaaattttggaaagaaagtctcaggcgaggaggtacagatcccaggtcgggagaaatcgggccactcctccacgcccccccaggtcaccccgggtttgccagagctgccccaggcgggccggcaggtgggcaggcgtggccaggaacccagcccgcgagggtggtgaatgccccttctccaggaggacgtcacaagggcactgcggatccctcactcaactcttatttgctgcacatgtcaaagctgtttaaaaagaaagcgctcaggacgttcccccgagtctgcagccggggttggcctccagcctaggtgtgatctgaagttctgtgattcagacccacaaacccaggctgcccagaacgcattcacccaggaacttgggcgtggagtgagaggcaagccccctgcccccgcactccggggcacacgccagtcactgcccagcccccaggcctcttagaggagctcagcacacagtcacatggagcctaacaaattgtagcccccgccccgcccccgcgccccgcccccacctgcaccttttgccgcccccgggctggaaggatccatcccatcccgcggaagggcagcggaccctcggagggacggagaggaaggagccccgacgggagagactgtggggtgaaaggcagtggaaaggcagtggaaggcggtgaagacggtggaaaggtggagaaatccagcactctgaagggcagctggggagcctggagaaggacatatgtgaattttggaactgctcattgttccaagccatgaccttgaagaaggcaggggcctctctggcctctgtgtccccatcgctgaggacagggtggaacacgagaggctggggggtggcctctgcctctgagccagttctcagctcttctcttccctctgaattcatgttgtgtttctcagccatgagggacccacggaaactggggcttgggaagccagagatggctttgagtttgagagaaggaatttgcctgggtcacatactggaaatggtgccaggcccagccccacccccctgtgcatgtctggctgagcttcctaaggagccagccacatccacattgcaccaaaccctgccacatccaatcctgaccgaacagccagtctacttgtcagtgtgggggaccagccacgtcagtcagggctccccagagaaacagaaccagtaggatccatgtccacctctctctgtctttatgaatcaatctattgattctatgtatccatccatccatctatgtatctatccatctatccatctgtctatccatccatccatccatctattcatctatccatccatccatccatctatgtatctgtccatctatctatccatctattcatctatctatccatccatccatctatccagctagctagctagctatccatcttctttctttctttctttctttctttctttctttctttctttctttctttctttctttctttctttcttctttctttctttcctctctctctttccttctctttctttctatctttcttttccttccttcctctctttctttctttcttctttctctctctctctctctttctttctatctatcaagaataagagagattggttttaatgaattggctcacatgattgtggggactggcaattgcagggcaggccagctggctggaagtccagggaagctgatgctgccatctgagtccaaattccgcagggcggcaggctgggaactcagcacggcttccacattgccatcttgtggaggagaatcccgttttcttccagaaacctcggtctttgctctcaaggcctcagctgctgggacgaggcccacccccatggtggagcgtcactttcctacctcaaaacctgctgagctaagtgttcatcctgccagaaaacacctgcacagcagcaccgaggcaggtgtgtggccaacagctgggcaccgtggtgcagccgagtggacacataaagtgaccatcaccctcgtggcaatgggtgcgggggtggggggggatggtctttcaagttccacagcaaagagattccaagggccttattattcccaataattaggacagattttctgtccaatttggcaaggaagcccaagacccagcatcgtgagcttcagacacggcaggaacccaaggcttcgggagacccagcacctgccccggcacgcacagctcaggcgcagcacctgccccagcgcgcacagttcagcagaggtcagctcaaccctggactgtccacacgagtgttggggcacgatggggaacatctcatgttgtgcttcttggccatgagggacccaaggaaactggggcttggaaagccggagacagctttgagtttgaggggagaagtaacttgctgcttacctggtttggtgggtggtcagggaggacttcctggaggaaggaacatgtaaaatgaggcccaaatgatggaaaggagctttgagcaggggaattccttccaggctgtccccagaactgctggctgcctgggacttgggtgccctctggggtacagtgtgttctcccgaacaccagtggctcttgtgttcagggcaagcgtggagctgatcctggggggtgaccctcgctttgccctgggctaacccaacagggatgtgaaccggagccccacactcaaaacccaactcacaaggcagacatttaaatttcactcattcagagacccgggtcagtccattcttaccaagcccccaccgcgtgctgggtccagcgtgagacagctcccggggcgcatggacagagaggccttgccctcgaggagctccccttctcatgagaggaagtcactgtctccagatgacagggtgacaaatgcctccaacaaagatgtgtgctcagggaggtcagaggggagtggtccctggggatcaggaatggccctgggagaggcggctcctcagctggacctggacagttggaggcgattaaaccccaagatgggaggggacagaggagtgccagctagggccacgggaccagacccaccttcccggagcacagggctgcgtgaggtgaggcatgtctgggccacggaacagggatgacatccttcatgcacccacacacacccacacacatccctcatgtgacacacacacccacacacatcccttatgtgacacacacacatccctcacatgacacacacacacatccctcatgtgacacacccacacccacacatgtccctcatgacacacacacacatccctcacgtgacacacacacatccctcacataacacacacacacgttatatgacacacacacccctcacgtgacacacacacgttatatgacacacacacccctcacgtgacacacacatccctcacgtgacacatacacatccctcatgtgacacacacatccctcacataacacacacacacccctcacataacacacacacacgttatatgacacacacacatccctcacataacacacacacacatccctcacgtgacacacactttatatgacacacacacatccctcacgtgacacacacacccacacacgtccctcacatgacacacacacacatcccccacgcgtgcacacacacacacacactctgcgggtggctgctcacccgccctgacatggggactgtctctccggtgagaaccggctgcaggagggtttggtgcagtgtggatgtggccactgctcctcaggaagctcagccggacacgcgcggggggacggggctaggcctggcttcatttccagcatgtgaccctggcaagctgctgctcctctcgggacctcatttttctcctctatggaatagggacggcagagccagtgtggtgcactgagccctggagcgccgctctgcaaaggcacgttccactgacacccgcctggtcaagctcagacccaggcagagaggtggccgagcctcgcagggccccgggtccgacccacccccgggtctggcagctttgcagaagggcctctttcaggaaagcaattcacacacaattcacagttgcagcctgcatgtcctgtgttgctgtgggctctggaactacgagtgaggacaccttgaatcccctgtgcttccaggatgtcacgtctgtgttcctgggacggagtgtggaaactgactttggtaacttcacgctgcttagatgcacggtgggatcagctgctgagagcaaatctgatcgcctcgtaggtgagctcagagctgctaggaagctcttcacaccaggggcctcaggggcacaggtttcgggccacgagctcacaggcattagcaaaaataagggttcctggctgggtgcagtggctcacgcctgtgatcccagcactttgagaggccaacacaggaggattgcttgagcccaggagttagagaccagcctgggcaacatagcgagacacagtatctaattttttttgagatggggtctcactgtgttgcccaagctgtagtgcagtggtgtgatctcggctcactgcaacctccacctcctgggctcaagtgatcctcccacctcagcctcccaagtagctggtactacagacacaccaccatgcctggctaatttttgtattttttgtagagagtgggttttgccatgtcgcctaggctggtctcaaacccctgggctcaggagatctacctgtctcagcctcccaaagtgttgggattacaggcatgagccaccgtgtctagccccagtatctaattataaaaaaacaaaaagaaaaaataagtaaataagggtttctggtaaattcttcctggagacacctggtgccagtcacacagcctcccgagctggtcactcaggctgtgcacacctcagccctcaggacagccagggaggcagcacgtaccccagccctcaggacagccagggaggcagcacgtaccccagccctcaggacagccagggaggcagcacgtaccccagccctcaggacagccagggaggcagcctgcacggctctgcccagacggctcttggagcatctggtggggccaagtgttctggggacacgtgctctggaaagatctgcttcagccagactttcacacaggacagctggggttgaccctggccggtgcagccagcaacacctgtgaggccagagggcagaggcagggattctcccaacagaaaatcaggtgtgacatcatctccaaagctgatcccgagtctgggccccaagcctgctgtaagtggggaacgctggtgtcttccttcaaggtccccaaagaagcagaccctgggagagggtttggggcacagggtttatgcgggaggtgattccagcaagcagggtgcgtggtggggaggtgagactgggaggcagggaaggggtagcgtgagtgaggggcaggtggccactttgaacaaccgcagcttcattttccttgcatgagccatgcaagagggtcattttcctgaggaccctcttgtaaaacagatccctggaggcccggctcttccctcctttcttgcttgtagttctcaagaataactggaatatgctggatgcacaagcccctgagataaagaggagcatgtggagcacccggggctctgctccagcccctcctagagcggaatgtcctagaacgctgcagcccagcgagccacgtttcctgagtgtaagatcagagtgggccgctttggggttcatcagctgcggggcagcatgggcacaggcagacaaggcccgggggagggaaggtgacagagagcaagttagggagccggtgaccacttggggaccagagctcagatccagagggaccccctgggtgttgagaaccctgggaattagtgtgccaactcctgcccctcttggtgggggtctctccagggcgagtgaagtcctaacacttagccagccccacacaccacacactcacacccagagatgtcctcgggtggggggcgcaggcactgaggaggcctgtggggtgccggggtggggaccccgtctctgccgcaggtatctgcagctctgccaccaggctctttcagcaccaaggagagcagctgaggggctcctgtgttcctgggggcccgtgtgctctctggacctgcagctggtcccattctggggtccgtgcctgttcccggaagcacggatcccaggcaggcagtgggctggcctggcctggttctgggaatcactttgaaggcagtgttttatgccacttgcctgccaaggcagagagtgctgcggccatggaggtgacagcttcccgggcggcgactgacgtggggaggctttgctgattcattctgggcatgaataaccaatttcctcaaagctgccggggtttgtgaatcagggttcccaataagaatgaacaaatcaaatccatcttctggggcctttcatgggacactctcagctccccagtgcgtcgtggggtttatagcatggcagtcactggagtgagcttgcttagagatcagcgcccggccctctggagctgggaagtacaacctgctgcagtgcccacacctgtgtggccaccaggctgtctccagaccccggctcaggcagctccaacactcgccaaacccttcaaaccccagccctctgctggggtatcttggtgggtgctggacaagccccgtgttcagatggggctgagtccctgtgactttgagtccctctgaccactaatggggagagaaatgtgtggacagccgatgccagccataaaatccccgtgagaattactcagcctgtgggaaaatggccagtagccgggggccatctgagggcaggagaaggctccaaatcaggaaaatctgccacataattgagtgcctggggcggctggtgaggcgtggacagggctaggagctgagccccaccacagcacctgcccacccctggcctgtgcagcagctatggctggtgatcccggacctctgtctaggcatcagacacaggacccaccctggccctaagttcctccactgcagcccctggagctgcctcccaggagaggcccagtgccggggaggcctagaggctgcagcgtctcctctccacctggctttcctctcagctgctctgtttaaggaaaccctgactcacaggccagaggaagatcgcccggcagagctctcagctccccagggcttccaaatgaagtttcttttaataaaaccttggtgatcagacaggaggcccagaggtatctgtgtgaggtggagagggtcagaggctatggtaggggtgagggctcaggcagctggccctgaagctgcagctctccctctgggagtgcagtggtcccgacctcacaggctcagcctcagcctcagcggggtgttccaagtcggcctggagtcccctccccagcacttccaccagtgagctcctgccacctgaggcgcactggggagaggccagctcctcccataagcttcccagcacccacagcgaatgtctgcccagcagggcaagggcacgagggggcaggcacactgtcttccccgaggcctggagctgggagcccagaggtatgccctgggtgggcggcctttctcctttactcgctttttttccaagccagcctgaacttaaggggggcggtgcactgccagctgaagtttgagggcctggcctggggaggtccggggggagacatcttatgctttaccagcaggaactgggttaggacagggctggcacagacctggggatgtacgggcccttctctcgacaggaactggcatcaaagatttaggggggaccctaatacaggggagagggtccctggctgaacaagccaggaagcggcaagcgaagacaagccaaaaaccatgtttgggagcaacgaggcggaccccggcctgcggcactgcgagtcctgatcttctgggcctgcacacgtgggtatgtgggagtgtggtcgtgcacaagagtcagaaggcagtggaagctgtgttgggtgtaaagtactgcacatgtgacacagttgtacacagatgcacacacacgtgcacacaagcgcatgcatacacaaacagaaatgtgtttgtacacatctcacacccatatgcatacgcctgtgaacacatgcagacaagcatgcacgcttccaggtccaatgcaaacccacttgcacaaacacacacacgtacacacaaagcccaaagcaaagctggcccctgggaagcactttttgggaaagcaaagcaaaagtgtcagcagctggagcctggtgagtcttggagcacaccccacctcccccagtttcatgccactgacgacagggtttgggtatcagcatggtgactggttggggtctgtgtttgcaaacactgtgccaagcactgctggacacagcgcatgtgccacggagctctggccccagagccagcaggcagcgggcatgaggactccagtcagagagaggggctgcgggagagggagggtcccggctggctgtggcagccacgggagaggcagccacatggttccattagcagccatctccaagctggagccagagatgactaagggagtgcggagggatgggacgcggtccaggagagcctcacccagcctcctccggcagggcctgccctagtaatgcccggtgaataattcagcagaggccaacccagacaggaagtgagcagggcgggcttcaggccaggcaaagggcaggcaggacataggtaggcggagtggccgcctctgcttgatggatttggggagagccgtggaaaccaggacctgggggcccagggacttgctgagggtcccccaatgagaggagggacctgctgaccccctgctgaccgcatgccctcacttttccctgcacgcactggccctgcctcctgatcctgcgggtgccctgcctggcactcccaggcccttgtggggctgagtgtggtggctgcatgtggaggggtgacgtctccccacccaggagctcagggcaggaccctcattctggttccctgagcagcagcccggggtgtcagcaaagtgtggggcatggaccccgtcccctcttcccctgcatgctggggttcccatgtccccaagtgcattgcacactggcagccagacccacgtggctgtctttcctgcaccgcgtgcatcagagctctgggctgtgaccactctgaaggtggctgtccttagatactgaagacccctgaagaggccgccccacccccttctgacctgctgtcccatcctttaccctccaagggcatttctcaaactcaactgcacacagaaccccgaggcgcacgtgctcgaggcccccgctgggatctaggttctgcaggactggtggcattcggcatttgaagcaaggtccggtgcaggagggcagcccacagccctgccactcagaaaagctggggaagctccctgcggatgttgggaagctgggcagagaggccacacgggggctggggggaagcgctgggagaggtgagggggagctacagggagagcccaactccacttcagcccccaccgtcactgtcttgatggggctcaggtggacatgaggagggctctgtgctatgaccttggtgcatcctggggccctcagaggaagcccacagaggcacctgcaccagccccaggcccccaccagagctgagccccagtggaagcggctccatcacaggggccatgcacatggcagagagggacacaccccaggaggagcagcacccagcatgggcacagtgcttgtgcatgtgtccacatatgtgcgtgtgtgcttgtgtgtctgcccgcatgcatatgcacgtgtgtgtgcatttgcatacgtgtgtgtatgtgtgcatgtctgcatgtgcgtgtgtgtgtcatgttggaggagtggtgtgcctgtgtgtgtgtgtgttcacggttgtgtgtgtgtatgttgtgttggaagagtggtgtgcatgtgtgtgtgtgttcacggttgtgtgtgtgtgggtgtgcacgcgtgtgtgggtgctgtgttggaggagtggtgtttgtttctaaacagagctcttccatggcagtaaaggctgggaatgcgtgtgggggttacttcattcttccctggccacagtgtctctatctgcctcccaggcctggcctcaggcttattgaggagatgccctcaggatccctccaagatcagcaacacccccacctctggagccagggaccaccacgtccccaggtgctcttcagatgcaggcatccccgtctgcccgctgtggccctgcagagagtgagctgggagggctgacttcagggctgggtggcagagaggcacattctggtggagtccgcaggccagttggcagctgggcagcccagctggtgcagacagcccccatgcctgcccagggccaggcatggaccccatggcagcagactccaccctgtgagcagtccacaggcagcctggagcacagcccctctgtctgctgaggctgggttcagacaccctcaacccctctcaactgtgtgcttgggactcaccttggcctcctagtgtcccagtttcctcactaggatataggcagccctggcctctaggagggctcagagaatagacagacgaggccactgcccccaggtggcccacattctagtgggaggtgcctgggaggagcacgtggaaatggtgtctgggtttcatcagagaggatgggaatgatggaataggggtgatgggcacctgcacagggaggaggagctttggacgcacagggctcaaagcagatgggatggtggtgctccccagggggaaggggagtgatcctccccaggggaatggggttgtgatcctccccaaggagaaaggacactggtcctcgccatgaggaaggggcatggatcctgctcagggggcaggggatgtggtcacccactggggctggggagagtgagccctcatggtgcacatggcagtgagtgtgtgcatgcgtgtatgggtgtgtgtgtgcgtgcatgtatgggtgtgtgtgggtgtgcatgcgtgtatgggtgtgtgtgcgcatgtgtgtatgggtgtgtgtatgggtgtgtgtgtgtgcatgcatgtatgggtgtgtgcatgcatgtatgggttgtgtgcatgcgtgtgtgtgcatgtgtgagtgtgtgtatgcatgtgtgtgcatgcatgtatgggtgtgtgtgcatgtgtgtgtgtgcatgcatgggtgtgtgtgcgtgcatgtgtgtgtgtgtgcatgcatgtatgggggtgtgtgtgtgcatgcgtgtgtgagtgtgtgcccgcctttcagccgtgttctcaaaactgtggatctgctcagccctgagggaaggctgggccataccctaaaaatcgatcttccctctcaaggtgcccctgtgatccgctcagcctcctgggctcagggagacttctccacctttaaccagaaccagaatcaggcctatccaatgcgctgcctttcaggtcgcggagcccacacagcctagaatccatccttcagatgtctgtgttcctttggactaagcggcggccctgctctccaaccccttccatggtggtgttatctgggacagctttgttagtcaccctcgggtcccacaggtcctagtaggagtttcatgggcaggaaatggccctgctcctggtgggattggctgtcagggccccagggtacccgaaaccccctgacacaggggtggagacaggatggggggatccagagagcagcacgacctctgcttcctgagttccctcccctcccctcagatggtccaggctggacatcagtgagacaggcagtggctgccatattactctcaccccatgggtggcatgtagggcacctttggggttggggtaagacatgactttacctccaagatcagggggtgtcctgccctgtcccccaacctggggcatcctttgggtgggagccgtccacctggtctcctgcccagcctccccttggctgcaccagctgagagccagaggtcctgggggtccctacagttcagtatccaggtacaaactgggagggggctttggggtggagacatccagcgtaggggtcaaaaagagaaaggtcacagcttggacttttgataagttgccaaactgctctgcaggcgagctatgctcgtccccctctccccagcaacacgagagcacccttacggtgtaaacactagtttgcagtctaatgttttcaaacgccatcattggccgtcattgagtgccttggcatttctctaatcagtggtgcccgtgagctgtttctcttgtgctctgtgccattctttcccggagcatcgcggcccatgtgctctccacaggacattcatcttctcattgattttcaagagtcctttatatactgcaagtattaactcttttttaaaagatcattttttaacttttcattttgaagtaattacagggttttaacaagttgcaaaaacagtagaaaagttcctgtggactcttcatccaacgtccccaaaagttagctttgaggctgggcgcggtggctcacgggcactcatcacagcactttgggagaccgaggtgggtggatcagctgaggtcgggagtttgagatcaggctggtcgacatggtgaaaccccgtttctattaaaaacacaaaaatttccccaagtgtggtggcaggtgcctgtagtcccagctacttgggaggctgagacaggagaatcacttgaacctaagaggcggaggctgcagtgagctgagatggcgccactgcactccagcctgggtggcagagtgaaactccgtctcaaaaaaaaaaaaagttagctttgaggatagtgatcaattgtacaatgatcagagaatggccactgatacaacaggatcacccagcaaacccctcatgcacgccctgctgaccatcccactcacccctgctgaccgtcccgctcacccctgctgaccgtcccactcaccaccctttcctagtccagggtcccatgttgtgtttagtcctcgtggccccttagtctctcaatctgggacgaatcctcagtctttgttttttcatgacattgacacttctaaagaatattgtcagttattttgtggactatcccttaatttggattcactgtagatttcctcataattaaattccacttatacagctgggcacagtggctcacatctgtaatcccaacactttgggaggccaaggtgggaggatcacttgaggccagaagtcaagactgggtaatatagctacaccccatctctacaaagtaaacagtaaaacaagaacaacaacaaaaaaacaagccagatgtggtggtgtgtgcctgtagtcccagccacggaaggctgtagtgagctgtgatcacaccactgtactctagcctgggcaacacagtgagaccccatctctaaaaaaaaaaaggaaagaaaaaagaaaaaaaattaaactgtacaattttgtcaagaatacagcaaaagcaatgctgatggagtttcctggtgtccgtgtgcccgttgctggcgatgctgactttgatctggggtttggtggtgtctgctcccgttgactttgatgacggttcccaccaggattctgcggctgagttggaattctatggtaaggaaaagctgtctctccccaatgcctgtttatttatttacgtcagtacggacttgtagattcttcttctatgggttatgtttaacatctcatcaatatcttcccccacattgttcagatttgcccagtggactcctccccgtgggatccgatgtcacgtgggcgtgtcctgcctgtgttggctgcgagcgtttcctcctgactcacacccagtagagctgcagcctccactgggcgaggcggccttggaaaaggaggcgggtgctgtcctgctgtggaggggctggcgggaggtgggttctgcagggtcagtcccgggaggtgcagctgtggaggggctgctgacccccaggatccccgaggccgcctgctcccgagaggccgccccacacgccagcctcagcgtcgggagaggaagccccacatgccagcctcaaggtcaggagaggaagccccacatgccagcctcaaggtcgggagagggcgccccacatgccagcctcagcgtcgggagaggaagccccacatgccagcctcaaggttgggagaggaagccccacacgccagcctcagcgtcgggagaggaagccccacatgccagcctcaaggtcgggagagaccgccccacatgccagcctcagcaccaggagaggccgccccacacaccagcctcagcgtcgggagaggaagccccacacgccagcctcagcgtcgggagaggaagccccacacgccagcctcagcgtcgggagaagcagccccacacgccagcctcagtgtcgggagaggaagcccccacacgccagcctcagcactgggagaggcagccccacacaccagcctcagcgtcaggctctgagtcccgtttctgcctctgggctcctcgtatgtgtgtgtcagcatcagatgcaaagaaaggggacgtatcctggtggggggacccggagtctccgttgcccccacagatcagtctctgggtgcctcccttggtgctgagagcagggagggcctgagagccatcccgagcccgtctcggttcacgcttccctgcctggcaggacccagggagagctgggcgggtggggcagccactcccggcagttccgagaggatctggaggaaacgtgccttactgcaaggagatggctggctagcggtggagccctgggcgccctcaggggagagccttccggggacagctgccacccttctgtggtgccggcctccttcccgccatgcaccatgcccacggcacccagatggtggagccgccgccggttcacactctggggagttttcccagcaacaggtccctccagccagggcatgcaggaaagtgcccttacgacgtgctcagggatacagccactgctcccaaacgtctctgcccagaaaggcaggtgggatgttgaccatagacacaataaccaacgcttgctgtcgtggggcctgtttgacagagggacaatggaggccagagaggcaaaggtgacttgtccaaaatcacccagccagggccattagccacctgctcagcactgcagcttttgtgccagggacctgcagacactcactcacactcatggagccaggaggaccaatccatgagcacagggcacctcggagtcccgggcgggcattctccggcgtccttcttctgaagcttctgaaaagttgctgagaaagacagagagggtgacaagaagaggacaggtgtgagaccctgcagaactgggttccacgtgccagcaggacccagagaccacggcactcccttctccctactaactggagactccgagaggagttctagacatggcaagacgaaacaagtccgtatcccttctttcccagaatcgagaaaaatgaccgcatttgtcagcagagcatgcactaggcgagccctgccttgctgtttaattcatcccaatgctccttccgaaggggccctcagaggatgcttccaaagcctggcataggcgaagctcaggaccctgcaccaggaggtcccaccccggagcccggatcactccgggaatcacagctttcgggaggagcaccttgctaccgagcctttggggtcctgcccgggccagcccttctgcttagggacctgcagtgaccctgtgctgggtcatgttcttcttggcacaatgagcactccctgggcaggtggtcctggcccctgggagctcggggatagaaacacagaagaggtgtggtcggtgcatctctcagatgactccacttagagtagtgtcccctgcctccagcttccaccagagtgtgccttggtggagacagttgccagcatggagggggcatgaccagcctgggccactgccagccttgctcagctgacagctgctgcatgacctttggcatggcctgtggtctccctaggcctccccatctgttgaacaagaagtgatctggaccagagacaagctggcagccacggctgggcagcacccacaggcatgtgcgtcttagggctgtgcagtgctgttgaaagtttgccgtacactgctgggggggatggaagatggttcggccactctgtaaaactgtcctgcaggttcttaagctagacacacccctaccagagactcagccgttccactcctaggaattcttcccagagggatgaaaacgcgttcacacaaggacttatgcatgactgtccatagcagttttatttgtgatagcaaaaacctgggggaaaaaccaaaatgtctaccaacaagtgattggatgaacaaatcatggtgcatccatacaacgcagaaataaaaaggagtggaattttgaaacacatgacaaaatcaaacgtgaaaataattatgctgcgtgaaagaaggcgtgtatacatgtgacttcgttcatatggaattctgcaaaatgcagttgtctgtagtgacatcggtggttcctggggacaggggtgggaggacacaggcaggaggacatgctgtgggtgacgaggttcaccgtggaccatgggaagggtttcgtgggtgtgcacataggtcgaagctttccaaatcatcacttttacatgtgcagttgattgtgtcaaataatcctcagtagagctggtcaagatagttgaaactatattcaaaactgggaaactgaacataatgaccccaattgcacatttctgttggaaaattagaagttctggtaacactaggcctgtattcaggtgtggtgtggggagtggggtgtggcttccaagggctgggcgtggctgtgttgggttgggcgtggctgggctggacacggctgagctgggctgggcgtggctaggctgggctgggttgggtgtggttggtcatggctatgttgggctgggtgtggctgggtgtggtgtggcgtggctggactgggcatggctgcactcagctgtgttgggctggatgtgactgggcgtggtgtggcgtggctgggctgtgcgtggctgcactcagctgtgttgggcttggctactgccctctgcacaggcctcaccgctcctcactgtccacgcgctctgtggtccagcatcatttctggtctcgttggctctgcggattgtgtcccttatgcctggccagctgccttcatcaagggtgactgcctggtgcctgcacaagtttgagtttgatggacttaaatgaatttcacacttttagtcactgaaactttggccaacctccatcttcctacagaagctccaagcatgaaaaacacaaatgtggagttacggtgtctaaagcgctgtcagcccttccagccctgcacactccctccttctcctcccggggtggccacgaggcagctctagggtttgcacatcagagtagtgctgggtgtccttcccctcccttgccctggcagttccaggccctgtgccaggaccacacacctcccacacaggtcctctcatggggctggtgcccccgagcacacgatcccctctccctgatcccaggctcctctgtcatgggaggggtgcgagttcttggaggccgagagtgtggcctgcccaggaccactgggaaaatgcagggtgaactgtgggtctgggtgactctcatgagcccctcctccatcccccacagcccctaaagagtgggacggtctcaggaccgcgtcccggggtgaatcgtgctcctgaaatggggactgtggtgcacagtcacatcatcccttcacacggcggccaccaggacaccttcagggcacttccggtggcaggaaacatccccaggcctgactgcgcctgaggacggtgatgccatggaccaggagcgcttcccggagcgggagcaggcgctcgctggctggagctcccccactgtgtctgacgcctcattccctggatgttcagggttccggtgctcagcaagaacctgtccggacacgctggggagcaatgcccccacagaacatcgggggccagctggaccatggcacgtgccagacactgcaccccagcagcggtgcatgcttctccagggcacgcagagcagtgaccaaggccgaccgcgctgggtcccagcacaagtctcagtagatcttaaaagactcaagtcgtgcagagaacaaagtaagaataatctcaagatttgttgagacttgtgttccttgactatcccagaattagaatgaaaggagaacccaatacagaacatcctgaaacattaagcaactcaattctaaataactcgtgagcgaccggcgtcgtggctcacgcctgtaatcccagcactttgggaggctgaggcaggcagatcacttgaggttaggagtttgagaccagcctgaccaacatggtgaaatcccgtctctactaaaaatacaaaaattagctggtcatggtggcccacacctgtaatcccagctactcgggaggctgaggcacaagaatcatttgaacccaggaggcagaggttgcagtgagccgagattgtgccactgcactccagccaggctgacagagcaagactccatctcaaaaaaaccaaaagaactcatgagttgtttagaagttgttaattaaaacaacatatcaacagaggaggtgacctggtatttttaaaatgtaactttcattgttattcaggtagggtgaggcccacaggtcaggagacaaccaccatcaaaaagatgatttgtcacgggtcccaagaggacagagctggccgcatcaccacggtgaaggggcacagggcaagcaccaggtaggccaggaggcagagggtgcgaggaacgtggtgtgggaaggaccaggccagggggtggacaggtggagaactggctggttgcattaatgccagctggtctgggtgtagctcctggccctggggtgattagggcagggggacgttggcccagagtgtggcccagttggggagcggttggggtgtgggctctggaatccttgatttgcttatgaagggtgatcttgctgggaagcccttggagggggagcccctcctgggtcaccccagatgtcaaagcgcagaagcacagggttaatgcagaggtaattagacactattttgaattcaatggaaattaaaacaacatatcaacatttgtgggatgcagattgactggtgtttaggatagattttacagcagtaattgctgaaacgataaaaaaggaagagatcacaaatcactctaagccaagagccagcaagctacagcccaccggccatgtctggccccttcttgctgttgaaaataaagttatgctggagaacaacttggtattttatgtgttttctgttgctgctttcacgctacaacagcagttgagtggttgcaacagacaccacgtggctcacaaaaccaaacatatttactctctagccctttacagaaaacccttgccaactatgataggagctttcacctggagaaactagtaagggaaaaataaattacaaaacgcatgcggaaagtagaaggtaataaagatcagggtggaaatcagctgaacaaaaaacaaaaacagaaaatagagaaaataaatgaaacccaagctgattctttgaaaagatcaatacaattgataagctgctggccagactgaccccaaaacaaagagaccctcattacaaacatggaggctaaaaaggacatcaccgcagaccctacagatgggaaaaaagagtcgagggggatggtgtccaatcttctgcccatatattccacaacttggaagaaatgaacaaacaccttgcaaggagaaacctttcctttcatgcattaaagacatcgttctgctgtctcctggctgccgtggtttctggcaagaattctgtagtcactggagtcactgcttttgtgtacgaaatgtgttgtttttctctagctgctttccagatgttttcttcagttttcagcaatttgatgatgctatgtctgggtctattttcctttctgtttatcttctttggggttcactgagcttcttgaatgcttacatttatgtatttcaccagacttgggatgtttcagccaatattccttcaaataactttctgccccaacctcctccttgctttctggaaccaggtatgtgctgggcctttcgatacgaccccagctggcccgtgatgcttgttcttgtttttcctctttatcttcgttcttcggagtggatattttctatttatctgtcttcacgttcgctggctttcctttgtctccattctgctattgagtccatcagtacaattttaattgcagatactctattcttttagttcaaaaatactcatttgtttattttttttcctacctctctgtgaggtttattattcatttcatctaatgctcctttctgaggtgtgtgtgcgtgtgctgtgtatgcgtgcaactcgcaaagcagttaccgcggctgctgtaggcatctgtgtcagttggggctggcatctgagcattgtctgttctcttgaggatgatcacaccttcctagttttgtgtctattgagtaattttgttttacgtctgagcacaccgtgtggactctgggtgctgtcctagccctcggggaacgttgctgtttccactttagcagccaggttcatcccaaaccccacctctctcagtgtggttctcaagacctttgctgggttggcactgctgggtggcactgtgagacttatgcggattcatgcacagaattaggcaattgccgtgtccagccctcccccttccggggttccgccccctctcttccctggctctcccccttctagggttccgccccctcttttcccctgctctcctccttccagggttctgccccctctcttcccccactctcccccttctggggttctgccccctctcttccccggctctcccccttccagggttccacccctctcttcttccccggctctccccattctggggttccacccctttcttacctgtaggactccttttcccaggttggggtttctatctgcgttttagctgcttgtgttgccatgtggatctgagagtggggcttgccctccagacaaagccacaaggaggaaaccagaaactccacggcaggtcactcctccaagttccgcctccgccctgcagtctccttactttgcaggtcctcagtagttgtctgtgtctcatccagagcttggtcacagttaggggagggctaggctaagccatagcaggctcgtggataaaacgtcacctccctggctctttcccaggatttcctggcagaggccacatttataagccatgcagtgtagtcacctgctgtgtgccaggcagcaagcgccattagcccgggaggtggtgaacagctcctgggggcaccagccagcaccgtcaccgtttggcagcggaggctgcggccagctccttgtcaggtgaatgtgctgcatgttgatgcaacaccttcctcttcttgccaaccctgggccaatgtcctcagacacaggcagcaacggaagtggccacctgcccaccatggcctggggagaagggggaagggtctgactgggggagcctcaagactgtgccacttgccccaatcccatgagaggcacctgctatggcacctcgagctggggcagaaggcctggagcccgtgcctggatgctgcccaggactctcaagctagtccagtggccttggctgcaaagtcctgctcaggcccacgtttccccagtgccttgcccagctccagagggaagtgattgaccgcagagccgatgagctcagagccggtggtgggcagtctggccggatggcggtgactcagggaagcggaggggctccccccaccccgctgctgctgccccccgcgtcccccccgcctgcagtaactgacaggaaggggcgggaggcggatgggccgtgacagcttaatggcttcggttaaagcatcctctgatcgtgctggcgctgggagaggctctgagctcgggtggcactgcgggcactctggacactgtctccggctgccgctgagctgggaggctcctttccagcaggccacgcggtcaggggcacctcctgccgcagcacctgcccagccctctggggaccagagtgagcaaagtgctggtgctggacctggccaccgccagaggcaaacacagttggccagacccaggccccacctgttcacgagatgccccatcccttggagcctccaggagccagggcaagtgtggaggcaggtgagacccagcgccagcgtttgcttcaaccaaagaaccacagcagagccgctggggacagcttgttcagccagtgcataatcagtactcaggattgtggctggtgcccctggcagactcagccctacggggatcggcccccagacgtgccacagcttggccactctgctctgaggagctgtctgtgcccagcacgcgttccagcttctgggatgcacaataggcgcccaggcctaggctgcgggacgaccatgcttgctgctcacagcgcctgtgagtcagagactccgacaggccacttgggatggcccaggcctcctccccaaggtctgcagcctcctcggggaagccttggggccagagcctggagactccagagggagtctcctacagacgatgccgccatcagtgggacctgcagccgggatctcgggctgggcctctccggcagccccacatgtgacatgggtgggcttcccgaggccagcacttgagagagaggtggaagccgagacgcggagccacctggcatcctttccgacagtcacgaggccctcagattccagaagaggggacagagacccctccatgggagcagccttggtcatgctagagaagagcctggggctgggagacccatggggcatcttttgaaaatgcctccagtcactcgtgtggccacccagcaaggccccgagtcatgcacagcccacccgtgcatgccacctgccgggacctgccccatcacctgccgggacctgccccatcacctgccgggacctgccccatcacctgccaggacctgccccatagctttggagccctgtctgctgcaggggagggaggcaagccccagaacagccccgagttctgctgcagtccggtcagccgggggcttcctgccccattcagtgtcccaggtctgcattcagcaagggttggatgctccaccaaccctgaccccccgggagcatacacctgtgggagcaggtgcaccccacctccatgcacacacagacacctccaaggttttcctgagagacaagatttggctcaggactcgctgctcagaacctgaaggtgtagaaagtgcacacactcctagcagagccgacctactgctataccctcccagccggtgccccaggtcagagcctgccccttcccccaaccctcctgcctcacccacacccctgtagccttggggacccacagaaaccaccgcaatgacctcttctagcaggcaggcctgtggtgcgcctgctgagctcaaccctccgtgaacttggctggcccttgccaggcgcagctcagccctgcatccgctggcactgcccaccagacttgcccacctgaccgggaccgggaatcttcctgtagcctctctagggaaggtgcacttttctctagcatcctttctctggctgatggagagggagctgggtgaaaggcagggccttggccagagcaggcctgatgggtggcatggggctgggggtggaggaagttgggggaggaagtgtctctggaggtccaaggcctcagctggccctgccccctgtaaacagccctattttttaaaaggcctccttacccagcttcaggggtttaaaggacacccccttcccttggccattcctggggacccccccgaccatccacaatattgtactagtatctaaagcagccagcaagtcctgtctgtctggagaaggtgagagttttcaggggctcaggacgtgctgagctggggggagcagggggcatggcttgacacctcacagcggcttcctgaagctcagtggtgcacaaagcagagcccacaggggagccctcgtaactcaaggcctccaggccatgctaaatacccagaagccactggtggggaccactgaggccatgtgagcaacacatttatcatgaacagctgttccccgtgttactccaagacaacacgaacaactgggccgggcaacccagagaaatgcaaactcttcctcattcagaaatagcaaagaaagttctccttccagaagggccctccccacaccttgtaaaagcaattttaaaaatacaaatagaggctccttcctcatgccaaggttcattattaaggaagagagcagttccaggcaacgcctttatttaaatatgatgattaaactgtttggttttaatgcaaatggaagacaccatctgaaattctgaaaggagaaaaagacgctgctggaggtgggaggaagggagaggaaggcaggaagggaggagaggaaggggccaaagctggtgaaattcctggcatcaagaaaccccctggatggagaaagagcatgaaaacagcaaacggccgcgaggcaaacagcaaacggccgcgaggcaaacagcaaacggccgcgaggccgaatggaccacattccaggcgaggcgggggcagtgttcagctgtagctgctccctggggacccacaccctgaccccgtgctagggagcactgggctgggggccagcgaagcactctggcgtggacggcaggcccatttttaacggtgctatttcattagcagttttactcagctgctggcagggccccagcacggctgcctctgtggctagaggggtgcagggggtgctgggctccaggccaggcagtgcccatttccacagagccagtgcccccacacagccacatgcagcagcttccttgctacaccacggggcctccctggggactctgcacctgcagcgcacacactgtccccacctggccctgcccacggggctgctgcagaggcgggctgccagctctcgctccctggggaatctggaatcccaaactgggagacggggcgggggcggggcgataatatctgcaccagctgcgaagatcaaagcacctgtgcacgaatggctgacccagagtctggccccctcatatgtgacccacgccccgtgaaggctgcacctggaaacctctttgccacgtcgccatcgtgggctagtctcgagctgcgccccagccagaatcctatgtatttgcaaactgaggacagagagggtcagctgtgtgtccaccactgtccacaccgattttagataatttggtttcctctttaaatagcgtttaagggaacgagcaaactgtcacctcctgaaacaagtttccaatagattaaagtgggtcttgtctatatagcacgctctgaaatgatccttgcccatgttgccgattaaatgcttatgtgctcactgtctcttggcccccaaatatagggcctgccttaaaccttcaaaccaaggcggcagtgccttcgtgttagagtccacttctttttattgcctcttgcctagaaaattatcgcaggggtgcacatgctgcatctcccacgaacagttgtctgaggctgggctaatagaatgtctcataaacctcgaaaagatgtttcaagaacacctcctcctcttggggccattcccagccgagttccagaatcctcaggccagcagggagatggtgtctgttgggacactgcggagggaccccttgttgaggtggtggccccagtcctgccttggggacccagccctgccctgttccatccctctgtgttccggatgaggctgcccagctgcagtgaatggtcgggggtcgggcccgtgacccggtgaggcgggcgagtccatgcctggaagtgaggagtaggctcggttctttccagtcctgctgcttgctgtcctgctgctgctgtcctggcactgggagaggccagcctgcaaggacaaggcaaactagatgggacccttcggagaaatcaggccatggcaacacctttctaatcttaagtccttggccagctaccatgccctggagacctgccggtgttcgggttccatggggggcagcatggccatgcaggggaccctcaggaggctcccaccaggcagctgaaaaggcacaacactgggaagacccagggccattccaccagggtcctgaccagtcctcaaaaccgccaaggtcatgaaaaacaaggcgagtctgagaaacccacagcctagaggagcccacggagtgaggagcaaatgtttcctggggtcctggacggggccctgggacaggagggcgtcagggaagtgcagcatccggctccttgccgtggacaatgctggcactctggccgtgaccaatgtcgcctgtgacgtgagaccttagcaccccggggggctgggcgtgggtgtgtggcgctctctgaactatctttgcaactgtctcgtaaatttaaaacaatttatttatttatttatttattttgagatggagtttcactcttgtagcccaggctggagtgcaatggcacgatctcagctcactgcaacctccgcctcccgggttcaagtgattctcctgcctcagcctcccgagtagctgggattacaggcgctcaccaccacgcccagctaatttttgtatttttagtagagatggggtttcaccatgttggccagtgtggtctcaaactcctgacctcaggtgatccacccgcctcagactcccaaagtgctgagattacaggcgtgagccactgcacctggcttttttttctctttttcttttcttttttttttttttttgagacagagtctcgctctgtcacccaggctggagtgcagtggtgtgatctcggctcactgcaacctctgcctcccgggttcaagcgattctcttgcctcagcctcctgagtagtacccggctaatttttgtatttttagtagagacggggtttcaccatgttggtcaggtggtctcaaactcctgacctcaagtgatccgcccacctcagcctcccaaagtgctaggattacaggcatgagccaccatgcccggcctaaaacaattctttaaaaaaagtattttaaaaagaggaaaataaaacacaatttgaacattcattgaggaaaataatgttttttcagaaacgaactgcactttaatttaatttacttgttcacattttggtcagaaccctggaaggagatgaggaagcaggtttgacaggcacgtggccaccgtgcctgggttccatggttttattagagagccaagagcagttgatggcaatgatgaagtcccagagtggaaaatgccccgcccagccctgggtttaactggcctgctggctgagtggacgctggtgtttttgcgcgggcagcaagggctcagaatccccatgtaagaccccgcagccatgatgaagatgagctttttaaaagtcagaggctcctggcagctgctgtgtgggagtgacatgggggaggatgtgtgtgacatcagggacacccccagccctggctttgagcaataatgctggcaagcctgggtgcagatacgggattgggagaaaccaaggccttgaaccgctgacggacttggtgggggagacgctgagcaacaaggagctgcccactgtggaggcaatgttcccatcccgcaggggacaactgtccctcttctgccccaccaggtacagaagagccacaggggacaggcagagaggaaatgcagaggctggggacttggggggtggcattccccaccccggggcattaagaggtctctccaggtaaacagaagctggaaggagcatgaactcccggcaggaacaggcctgctggcgtgaggggccacaggccagcgaggggcccgggatgccggtgcagccccagtgccaggaggtcctgtcgtaggtcccaggccagctccttcctctgtgtgaagggagcctggaaatcccagaaagatctaacaggatcagcagaaaaccaggatggaaatgctgtggaggccgcctgctgcccgccctgctgtgggggccgcctgctgtccgccctgctggaagaatgtcccgggctgtggctggccagcaacactgcccacgggccctggcagaggagggaggcgtggagcaccctgcaccctccaaggctaaattcagaggcggccgctgagatttctcgagctcatctcccaagcacggccctcagagtcagatgacgggggctcagggtcagcatcctacagacccccagaatcatcaggaccccagctggggcagatggaacagattggggcagagggtgcgccagtctgagctgccccctggcttccagcagcatccctccattgtgctgaatgtgcctccgccaggcttctagcaatttccaggacctcatgggagaggctactggctgagctccacccaggactctttgccacaccccttgaaagcagagagccacagggctgccctgctgtccctcactggccatctggaccgtctgtccatttgtcagctctccatggggtgccagtgctaggccaggtcctgtctgggtgtggggatatgaagatgagcaagaaggcagggtccccactcatgggccactgtccagtgggtgaggccagcttgaatcagatgatcacccactaacagaacatgcaacatgataagtgcttagaatatgacagagagtctgggcttaaccagagggcttcctggaagaggtgacattttagctgagactggaggatgactggagattgtctgggagggaagagcatggcgtggatgttgctgtggttaaaacgtacatggtacgggggtgggaggggcaggaggctggagacctggagaggggtctggtcggtttctaagagcaggagagagctatcaaggggctccatgctagaagggactggattggaggggctggctgggaaggaagcagggatgctccagggtgcagggagtatcaggctgttactgttctataaggtgatggcttgaacctgggaagggtgacagagatggggaatgaagaacaccaaagatatttgggagatcaaccaataagatcaacaccagacactgtcacctgagttccttattgtatcagtcagctacagctgtgtaacaaacagccacaatcagctgcagacagtagacaacatttctttctgagtcccatgtccacgggctgatccagctggttctggctgtgggcaagggtctgctctgcttgctgtttcttgtcctcctgggaccagcaggctgcctggggccagttcctgccatggtgaggacggaagtgccagaacatagcctgactgcccatgtgcaattcaaaccttcacttgtgccatgttcaccaagatcccattggccaatggaagttatgtggtggagctcaagtccaggaggtggaagaagactcttcttgccttgaggtcccacgcgagggtgtgggaacatgctgctgccgtggggaggggagaaccgtggctgagagtccacccgggagtgtgctctcgtttcccagtgactctgtggagagaaacatgccaacaaaacttatactacaggtaaaaggaagaagactttgacaaaggtggagcccttgacagggaatcattttgggtgaaatgtccattaaggagaaaatatctttttcaaaggccccctgtccctgggcgtgtcaaatgccagtgcaaacctaggccaaacacacggagaaatactggcgagatcaacagttcaggtgggaaaatgggcaggttgagcggccgtccaactaagaggccctggaaggaccaccgcctccctgaaggagctcaggagggagaacgaactcccgaattcccagcccgagtcgcagagcacaggcggaggggcctgcagatgccctccttccagctcccgccccaccaggctggcagctgcccgcagaccagccagacagcgtcattacagtaatccaccgcggcaatgctacacataaaaagattgctttcccggaaaactgctgacacgcgggtctgggagggagcacgcctgagagagaggagagatgggcctcctggatccatacgatgcatgatggctccagctttaatcaattttcaacccttgaaactaaaatagtcgtgattgatgaaattccacaagtcagatcttctctctattgcccgtgtgctgtgagcagtgaagaggtacgctcccctcaacagcacctccaggcacagggggccttgggcagcctcgtcggagatcctccctgggacacccaccctaccccaggcccctcgcgtgctgacgtccaaacgcaacatgagcagacacaagcacggggtgtctcccaaaggaatcatcacacctgcaccccccatatctaggggacactctctctgtgctttttaaattttttaattaaaaatctttgatacataatagatgtacacattttcagggtacgtgtgataatttaatccagtcatgtaatttgtaaaggttaaatcagtgtaattgggatatccatcagcttaaatatttgtccaatttagaatgattctctcctagttattttgaaatagacaatagctgattgtaattatagtcaccctagtgatctgtcaaacattgggtcctctctcttctatcgaactgggtgtttgccctcgtgaatcagcctctcttcatctccccttcccctccccttcccagcctctggtaagcatcagtcttctctctgcctcagcaagacccgctttttttcactcccatgtgtgagtaagagggtgcgatatttgtccttgtgtgcctggcttatttcacttaacataatggcctccagttccatctgtgttgctgcaaatgacaggattttattctttttttgtggctgagtaatattccctgggtatcacttttgcttgtccagcagatcctcagcaagatcaggagtctgtactccggggtcagcagtggttgaaactggccccaggcctcaggaagtcatgtcccagtggacggagaggtgactgatagaggaaaaacagtcctccccacggacaggagactcacaagtttgtatgaggggagttccttggaaatatacaggaaatatccacttctatccattttcaaaccatataattatattccatctgtgatctctactcactcgaccaattattgaaatgagctatttgaagtggagatgagaagtcttatgtcaccacgtacctaaatctactgacagtttaataactggaatgaatatagatcattttatggccctgaaatgagtgaggcctttccaagcatcacaaaggaaaagattgatatatttgactacatgaaaattaaaagcatctgtatagttagagataccataaaccaaaattaaaagcaaatggcaaactaagagaacatattttcaatagacattacagacaaagagttaattgtgttctcataaagcaatatagtttttaaaagacaagcccacccctagaaaaatgggcaaaagacgtgaacaggcatatttgccaattacactctaaccaataagcttatgacaaatgcctgacttctcttgaatcaaagaaatgcaatgaaagcatccgtgatattcaatttatcttctgtcaaactagcaaataccattttaaattgtaaaaccaattctggcctaagaattgggaaaatacctgctagcagaaataaatgggcacatcttcttggggatgggggtgggggcaatggtgcattctggaacaatgtacccaatcccaataaaactcattaaaatgtgtcctaagaggatgagtctctgcacaaaaatttgcatggaagaacagtcattacatataatacgaaaagctggaaacggtctcaaaagttaaataaatcatggtagaaaggcacgcagccactgaaagtgttgtagaatattcattgacatgttattcactgacatggaatggtgtccaggctaggctgacacgtagaataaaagagagttgcacaaatggtgaacatcacgtgtgtactattctgtaagaaagaaggtgaagaattaaagaagtaggtgatgaagggcatgcgagtcctggttctccccaaaaacactctctggggaactgagggaccatgtgaactttcttgctgtcaatcagaagagattactagagaagcgggtcagtttcttatctaacatgctgactcaccaccttccatccccactgattttgtcccgtggatcgctctccacagtaatttcgaagcatcctgtgggaggggtatcctgggactcacaagcaagtgcagagcccggggaaggctgcacgctctgccagtggccaccagacccagtgagccctgggtgcagcggaggaggcagaagcagcagggtggcaggggcagctgccatcaccattttttttttcagctaaaactgatttgttaaaaaggtcgtgcgagtgacggagaggtgcaggagcgtggccggcctcgctcagccacctttcagacgtggaggaagactgtgtgcagcagttgctggcgtctgcctgcgtttgagtgcgagctctacgctcactggcgatgggacccgggcagccacggctcctcattgttttatcctaatctcgaatgtgggacatggtagtgtctggtgtgaggttcatacgagttatcatagggtcaccgctcacgaaggaagcgtccgataaatgcgcgtggccattgttaaccttgttattgttactgcatacaaccaagcagacacggcctctttccaagagcatttggcttggatggagattatgaacatccagctgaggcacgtgcacgccctgcaccaccgagtccatcagaagcacatacgtcgttcccaaaatgtgtgtgctagagagttgacagcgcccggtcataattatctcaagctgaaagcagcccagacgcctgccaaccatttcgtgtgagtaaatacactgtgggatctgccatgcactatggccccgtgaaggagcagcctcagctgtgctcaacaacctggatgcatctcgcaacctaacgtctcgtgagacagcctggcacgcacgacgcgaactgagtgactctgcccagcggaagcacagaacaggccaaactggcaaacggcgtggcacgtcctcaaaaatcaaaagtagaatcaccttgggattcagcagtgccgcttctggaaaccgggtatgtggccgaagacctgaaagctggctctgcacttgtacacctgtgttcccagtagccttagtcacagtagcccaaaggtagaagccaccaagcgcccctcggtggatgaacaaaatgtggtctattcacacaacggaatattactcagccttaaaaaagaagggactgctaacaccggctacgaactgcacggccccggaggacactgtgctgagtgaaataagcagacacagaaagacaggtcctgcgtgcctccactcgtacgaggttcctagagtggccacacgcgtagagacagaaagtagagtgggggtaggagtggcagggagttgctgtttcatggggacagagcctccgtttgggatgatgaaagttcagatggtgggtggtggtagcggttgcatgtacgtgtttctgtgtgttgttgtccatgtacatgttttggtgtgtcgttgtctgtgtacatgttgtttctgtgtgttgttgtctgtgtacatgtttctgcatgttgttgtctgtgtacatgttgtttctgtgtgttgttgtctgtgtacatgttcctgcatgttgttgtctgtgtaggccatgaatctgcatcacgccagtgtgtttataatgttcatgctgcacatgtctgtcaaatgagccaacgtggtgcgtgttttatgatctttcactcgatcacatgttgagcactgtgcgggctcaggtcgctgtcacatcatgggggctgcagagtagagaccgaccagccgacccggcacgttgcctggggctgggcttggatctcttggggatcgtggtgggtaagagtgaggaggggtccccattctgaaaggcatgaacaatgctttcatttgccccttacccccaagattccagttggtcagggagtcccccttctcctgccctcctgggttaggggtcctggcctttggtgggtagggggcaaagtgatgagtagaatctaaacatgctgtcatggtttcaaatggtggtaaggctgttcattcacctgggtaaccagtgcccccatctttcagggtctgtgggattagaagcaacttttattccagcctcttgacttattcttattttctaaacttctataatgaacttgtgttggttttttaaaaggaaagaaaatgtatttccggccaggcgcggtggtggctgaagcctgtaatcccagcactttgggaggctgaggcaggcagatcacccgaggtcaggagtttgagaccagcttggccaacatggcaaaactctgtctctactaaaaatacaaaaattagcagggcgtggtggcacacgtctgtaatccccatgcatttggtggcgatgtgaggcccagttggacttcctgcatgcagaactgattagaggcacctgggcctcccctacccgtgtgctgggggcctcctctgacctctgcacctggagcttgcaggtagatgctgaagttgagcttccctgcaccttagtgttctgggatcccaaatctatccaccccgctgctccaccctgctcagggtgcccatcaagggccgtggggactatagctcatcagagaccttcctgttcctcctcagagatgctggtttccgaggagtcccaggagggctcccagcaggggccgacggacatccacacagcagcagattccagctggggtcgctgggtgcctgggctcagcaggggcgaggctgccctctcatggccaggagaggcactgcctgggaggccagtgggaaggccccggggacttcacaggtccacacccgcagggagaggagtggaccccacgcagggattgggctgttggggcctctgtgcctcccggaaccccacgcatttggtggtgacgtgaggcccaattggacttcctgcatgcagaactgattagagttacgagaaagactttttaaaaaaagaccctgagatgtcagctttggcagctgtacctaccggtggaagaacaggctccttccctcaagcatgactgaaaaccgtttaaaaagaagtgctctgattcaatggttcccagttacaccgagttatggagacatcgtccctggagcggggcccgcaagagtctttccctcccatggggcaacgcagtggctgcggatcccagccagccccgagggacacaagtgtggccgtggtcagctgcggctttgctagaggccctccctgctctcatgagaccccgagggtgttggctttctgcccccaagactgacaaatggccaggtgggcctgcaggtgacctccttccctcatgggcagcaggaaccaggtgggcccccacagtgcctggggcagcttatgcagcagttacagagatctggatctgggtgagtgtttccttttattccttcttatattttcaaaaatataatatgtctatgcatagaaaaatgcccgcagcatatgcagaagtcaccagcacatactgggatgatcccaggaggcagtggtcagtgaggtcagtggggtcccctgccccaaggccacctaggggcccagccttgcctggggccaagacatcactgagcaatgaagatgtgagcctggggcacctgtgactctgcgtgtcactccagagcccagctgaggcgctggaaggggctccaggaaaagccaatttgggcacccggaggggtgacacccacagtggcccaggtcttctgctttcttgaaatccacgagattttgatgaaataaaagccattggcgcctccttggggtctcacagtctcacgtgacaaccgggagagaagccggaggtgggtgggtcaggccattccgggcacacagcgggacagcagaccctgaggacacttgtccccgcctgggagttctccaccctcctgttctcggatgtgactcagcaatgccagggctctgcagctccgggaaggccccgaatcggcctgccaggcccactgtgagacacgaggaggaaggggtggcggctcctcagccgacactaccccaggcaggcttcctgtttgtgccccactaggacctgtctcctgcacggccagccctgagagccccacagggttcgtctgtttctcccccagagaccaggaggctggagggatccgtgggcccattttacagatggcatagggcagagactcgaggccaggcctaggtctggcctcacacctgacccccacctgcccccagccaaaggtcacaaccccaaccccctccacatccgtaggtcatgccttggaaaactgccccacccatgcagaagatgggagattttgtctaagaaaagaatgatggctttgcaaatatttccactctggttccccatgacagttcactgtgaaaccccggtgaccccacatgacctgccgtttcctgtacaagggggtcccaggtctgagtaattttgagatcacgaggtcccaggatgtggcatttgacacgggcagctaaggccaggagcagccagcaaccccagagcccagcccctccccggggctctgaggggaggaattctctcccccgggtaaatgcacccaggtggaggtgtcaggtcagccacacagaccgaccttcccgcccaacgctcctgactcaccagggctggaggaccaccagggacctccctgaaggctccatcctgtgtgggctgactgtggggccagagaaagaggaagcttccaggctgggccccactacccaagaacctaaagcagcccccggttctgcacggggagcagcgtctcctcttgccccctggctggtgagcagagcttccttccacaaagcggggggtcagtggagacagcccactctatccccaaaatgctgggccagtcgggggatgggccactctgtctctgaaatgccagaccagattgttcatctgcagggtttcttcggcgcgagatgagaggcctctggtcccatcctaggaaccacggcccagactgtccctgcctcagaagagtgacatggacacccacacacagtccccccaaacagagacacacacgccgacaaacctgtgcacgctcatgcccactcacacgccacaccccctcccctgctgggcaccagataatggagctgcggagctgtgtggctgcaagccgccctttccgagcttctgctaggtggtgtgttcaaacctgcaggcttcgaagagttctgagcatctagaagagcagagtccagtaaaaatgtagcaaagccacgcatgtaagtttacctgtgctggcagccatactgacaaaagggaaaataaacaaatgagattaattttaatacttttttatttatttatttattttttgatacggagtttcgctcttgttgccccagctgcagtgtaatggcacaatctcggttcactgcaaactttagctcccaggttcaagctattctcctgcctcagcctcccaagtagctgggattacaggtatgcgccaccacgcccagctaattttgtatttttagtagagacagggtttctccatgctggtcaggctggtctcgaattcccaacctcaggtgatccgcccgcctcggcctcccaaagtgctgggattacaggcatgagccacggcacccagccaatactatttttatttaaatccaatagagccataatattatcacttggataatcaatacaaagaattattattttgagggatggagtctcgctctgtcacccacgctggggcacagtggcgcaatctcggctcactgcaacctctgcctcccgggttcaagtgattctcctgcctcagcctcccgagtagctgggattgcaggcgtgtgccaccccatgcccagctaatttttgtatttttagtagagatggggtttcgccatgttggccaggctggtttcgaactcctgacctcaggtgatccacctgccttggcctcccagagtgctggaatcacaggcatgacccaccatgcctggcctaaagaattattaaagagtgattttactctcccttttttctactaagtctttaaaatctagtgtttgttttacacttatagaccatctcaatcagacactaaatttttatcagaaatccttgattgtatttagatttaataaaatgtagagtaaaaaagtatattgtcacccaaattgtttcaaacaaacttgaaagtttttaataatggaaatgggtattggttttaaatttttaagacaatacaataaaaccctctgtgccaaatcccccacagagtcatggcattggggtttcgaaggcctcattgctggcccccacctgcaggcatcccttctgggttgacagccacgagatgagtgttatcagtgtctgtgggagaagcaggggctctgaggttgggcgagcgaaggatcaggtgggcactgcacaccgagggcacaagagcctgggaagccccaccatgaggggcggacttgactgagcccaggcgtccaggcccttgtgggcacagagtctcctccccaggaggctgttagcactcggggggcggggggctctgctcgccctagacccctcttctggacagatggcagcaccatgcccctcccaagccccatacccctgtgcaagccctgcctgctgcccggaggacccatgcaaaagccgtcaccgcccacgtccaggcctgggggtggggggaagagcactcaagtgcaagaggcagaccctgtgcccccacccctccggtgcctccctcacccctcctgtgcctcccctaccctcccgtgcctcccccacccctcccgtgcctccccctccactcctcccatgcctccccccacccctcccgtgcctccccctccacccctcccgtgcctcccccacccctcccgtgcctccccctccacccctcccgtgcctccccctccacccctcccgtgcctccccctccacccctcccgtgcctccgctgccctggggtcgcagcctggcaggtcctgcgcaccccgatccccgccggccagcctggcatcacccacacggtccgcctccccaccccgatgccctcctactaccccctggcatttttctgtgtgtgtccagctccttcctgccacggggcccttgctcggccgctcaccatgccccgccctccctcgactgggcaggacctgctaatcctcagatcccggctcagagtcatgttcccaggaagcccctggccctgccgaggtcagagcctgtgacagccaaatgctcccaaacacacaccatgctggcttgcgaccacgcctgtgtggctgtgcctccgtggctgtctcacccgtggtatctgtggcgtcgggaaggaccctgtctggctgcaccgcgtcccagtgctaggatgaagtcaaagcccaagaaaccagatgaaagaatgaatccacagacagaaaactgtgacaaaagctttgagtgccctgctcccgagcacggctgagacgcggagctcaccccagcctggagaactcagggcagccgtgacccaggggcaggaagaggagccggtctggctctgggcaggtctgggctccttggcacacgtgccccaaccctggcactcctcggggatgaggggggctgtcctgcctgggtgccacttcagtctatggggaaagggtggattgcaggccaacagacactgcattgacaaggagctcatgggagcagtcccggcagccaggctggcctctggggaaaggacctggggccaggaccctgagagtggggaggacagctggggctgaggcggagggaaagctttgggaagcagagaccatgggggcaaaagccagcatcaggggagaccacgcacgggaggaggtcctccgagcaggaatgccctccaggcaggttggatggcagcccccgtgacaaccatgtcctaatcccccaagtctgtgactgtcaccttacttggcaaaggagttcagaaccttagaatgggagaggagcctgaattatccgggtgagcccagtataatcaccagggccatctaggaaggaggcaggagggtcggaggcagaggaggggagtagaggtccgaggcagaggaggggagtagaggtccgaggcagaggaggggcgtagaggtccgaggcagaggaggggcgtagaggtccgaggcagaggaggggcgtagaggtctgagggctgcaagcaagggcttgagccaaggaaatgcaggtgggaaagacagggacatggattttgccttaaagcctccggaaggagctcattcctgctggctcctggtgccccagttcagtcctctgcctccagaactgtaaggtgacctgtgagctgtgtcggcccttcgctggggctgttactgcagcccccgaaactcacccggccttcgagaaaaggagtgcaggtctcactctgaggccccaggagcctcgggaggttcccagcaggaaacgacgtggtctcctgcatgtttctaacttagaagccaccgtgggagtccggcccggaggcagccctggcccacggctcacgctgctctgggctctctatagagtcgtccccctgctcctcacagtcctggtgtcccccgctttacaggtgaacaagccgaggcccagtgctgcctgggtgctggcccttgcgacggcccaactggttgggttggggccatgtaagtgccaggcaggctggtgctgcctcctgggcggtcacctcccggggacgccactcggtcaccaggggaggcggcctcaacagtgcctgccgtgtgacgctccccagcctcggaggtggccttggctccagggcctatggcaggcccatcagtcccaacaggcgggaagagcagcctgacctggttgagctgggacctccgaggccacggacgtacacaccgtcctccctccacagcctccgaggccgcggacgttcacaccgtcctccacagccaaagggctgcccgggtggttttggttccatcagtgaagttttctgtggttcactcagagcggagctgggcatggcttcctaattgtgtctcctctggagcacttcagagccttcccagggcccgtggagcctgaggtgtgtgctggcacgtgtggcacaggcctgggagtcccagcagcggcagagagacccggagggggtcaggtgccctccacccacagagagggggtgtgcgtgaagaggaggggtgggacgaaggaggagatgtgttttctgctttaatgatttaatgggtatttaaccctcccttggtatttgcctggcttccgggtgctctgaaaagtttccctaaaggggctgggggaggggagctggcgccatgaaggcgtgagtcaggtgggtgaggctacgcttgctggaaggagtctacgtgccttctgaacacacagctaacagcctgcacctgtcccaaaggccatgcttccctgtgacaatgactggttcctgcccacgtcgggaaagccttggacagctttcctggcctccagagaaccaggggagttgggcttgtcaaagttcctgggagccagtgcttcccctgcaggctgagaccagcccaggaaacttcactctcaaaccaccgccccagggcagaaacttccctggccgcctgccctggtaattttccagggttgaaattttcctctccagggcaggaaggaccttcagccactgatagctcaaccagaaatgtttctaccggaccagaagtcacaaccgcccagagcatgacttcactcagcctcaggggcggggctgtggggagcagtggtcggggcccctcccacctgcagatcaggggtgtgtctggccacgccccaccagcatctgcaagggacagaacgttccagggcaggcagcacaacaggccaaggactcaggatccccgccagaggggcaggggctgcaggaggccacccgctccccgctgaccttggcaggagcacctgggaagctgtgatgatcccgcccgggtctcctctcggccctgaggtcgcaggactccagccactgtggagatgagagggagtgtggcttcccctgaaatgaaaccagacccaaaccaagacaaaagcctcccacattgatcctatattcctgcccttccttgagagcaaggggcaggatttgacttcccccaggggtaggggggcacgcatggctgcttgggcccatggaaagtggctggaagggccgcgtgtcacctctagtggagacccctgggacccagtgtgcagtgcaccctggccctggcagcgacacctgcagcctccaggtggtgcccgcgggggcccgtgcagggacgcgggaccagggccctggctgctgtggggcctgatctgtctgtgttgatggacacacctcagagccaggatgaggcccagaaggaccaggagcccagcctgtctcctaagcagcttccaggtacttctgtatttggatatttttaggagaagctctttattatccaaagatgtcatcatcaaaaaagggaaacgaccatccaaccacacttctgccagttttaccgaaagagcagactgtgccggaactcggtgcttaaaaggacagagcaaacccctagtctactcagagaggaagggcacgtccgccccactcgagggaggaacaaggctgtccactcagtaagtctttgtaaggagtgccagggtcctgggaacaacagcagcctgtgctcccgagagtcacctgagtcggcctggacggagcctgcagtgaccggaccaggcaggtgagcgtgtgcccaggcacgggctccgggttcaggcacacagagacctcagcctttgctttccctccccacaaatgacggcaaaaaaacacgtgaatccaaggcccagggatgagctcggtttttccgttcacagtgatgctctgggatgtggaggaagaactggcacgaggctgcagcgacgcggcccgggcctccgaatgctgagtcaagcagggccattgcacgaggatgggcgggtgggcgcaggccagaggtggctctcccgtgtcctccgtgtggccaaggagcatgttccttcatcatcacagtcacatcacaccaccaagccccgcgaaattccaaccctttcattccttagcttgtaagataatgctgcgtgaaccaagacaagacacagccaagggggccatggagggtggcgggcaccgtgctgtaggctgagctgctgtgccagggcaccatgctgcaggctgagtgagctgccatgccaggcgaccactgggcccggccctgcccagggtgtggtcagcccgggagagccatgccaagccgcggagagaggagcggcccccagcctcagcagggcacgtgcgcacactgccgggggcatctgggcctggacacgggttgtgatgtgggacgtcggaagagacaagaaaaacatggctccatgaaatgggagcagcctcgggatccccaggaagtctcaccctctggaggcaggtggagcattgacttggccggaccccatgtcccgcaggcgcggcggcccctcgtgggcatctcagctggaacgaggcatgagcaagggcacagtggagccgcactagggtcccataggggctgcttggttcagagcgacaagccgacggacaatggagtgggtggcactgtgaattgcaaggcagcccattctgtccccggagccccctctgggtgcctttcccttcgcagcaccttccctccagctccagacacctcaggacccgccaaggcctcacactgggtgtgcaggtccttagggattccagactggccctgcagtgcctggggcgggtctgtgggcctggggaaggggccggcagggttgtgtaccacagtggttctgctcatatgtgtcttacttactggggttctgggtcacagttcagtcccgctgccttcagagctaggaagctgaggctctgaggggggaaaccagaggaagggcagggacgggtgccctcgaggtgtgacccggcaggcgtcttcctgaacagtcctgccctgcggtgccactgctcccgcctgctgtgcctgctcccagaccgagctggccttccccaccgcagtcccaacccagggcaggaggcgcccccacactcttgcctcatccactggaccacccggggtgcagcctcccaggctgcctgtggggttggcaggacccaggggcttcctcctgacgttgagcatgtgttggcctctggactgacctcccaggcagaggggcaccagggagaggtcatagcctctcctcaagctccctgggcactgctggcagccccagggtacaagcaatgtgccaacaccccctccccctcctgctcttccagcccacggtcactttcaccagcagcctcacccagagggcaccagccttggtctaggtaaatgccacctcacctccacagatgaccctggatttctcacctctaagcctaattgcccccaaaacccagagttccatgtccagctgctgatccactatcacgtctggcacccagcaggtgtctcagagttttcctgtctaactcagaaatttttcggcttttccccagttggctctccctgccccacctgtcctcctcacctcgagaatggcctctttccctcgtctgccacctctggcctaagagtgagtcctgagccctagctccaaaacttttctcaagtctgtggcctccttgccacccctcctgcccatcacctcttacctggtctcctgtctccatcagtccctctccatgccacaagatctcctaagaacacacatcaaattatgtcatacgcagttaaaatttctgcggttctctgttgctctttagataaagttcgagctctttaccatgtgttgggaggagggctggcatgaggaagaccttcatacatcattgtcattgtcatcatcaccataactcttatcaccatcactaccaccatcatcattaccaccaccaacctcatcatttcaactattaccatcaccatgatcatcaccaccaccaccatcctcatgacaaccatcaccaccaccacaaccatcatcatctcaaccatcaccaccatcaccaaccccatcatcatcaccctcatcacaaccatcatcaccaccaccatcatctcaaccatcaccatcatcaccaatcccatcatcatcctcaacacaaccatcatcaccaccaccatcatctcaaccatcaccatcatcaccaatcccatcatcatcctcaacacaaccatcatcaccaccaccatcatctcaaccatcaccaccaccatcaataccaccaccaccaccctcattacaaccatcaccaccatcattaccaccatcatcctcaacacaatcatcaccatcaccaccactaccaccattctcatggtagccatcatcatcacaaccatcaccaccaccaataccatcaccatcattgccagcatcatcactatcatcatcgtagtttgcctacaaagcaagagagggtcttggctcagtgtaaacaggctttgatactccaagctcaccccctagaagtggcaagccaagacccaggaggcaggaacacccccagacagtgcctctatcactgggaatgaggcctgttcaaagggaattgtccacatttgttttgtgctgctataacagaataccacagactggataatttataaagaacagaagtgcattgactcacacttctggaggctggaaaatctaagattgagggttggcgtctggcaagggccctcttgctgcatccccccatgggggaagtcagaagagaaggcaggagagagaaagcaggaggaggctgaactcgtccttttataaggaacccactcccaaggtaatggcattaatccattcgctctgccctcatggcctaagtttccagcacaagcgtatggggggacatatccaaaccactgcacgagttaacacctctcagaccatttagagatataaataatgagggttatgatgacagtgtttattagcactcttggggtttttccatttccctgatctgatgcagctgtgaataatttgccactaggagctgcgtcagccaggcccaggaagtggcccctgcctcactcagccaagcgtaaaacctgccatccggccagggccaagatccaggcacagacaacctcttggccacttgaccccccagcgaaatccgcagtagcccctgagatcaggaactcccctcagcccttccttgctctgttctggccactccagtggcctctgtgcctgccttcagggcctctgctcttgctgccccctcctagggcatactttggccagtcatccactgatgactggggtctttgcctaaatgccatcccctaggagaggcctgtgctacccaccccccaccccggccaggtaggtctgtgagatttccctgtatgtctcatcactacttaaagtcagcttgtttatttgcatgtttatctttctgatccatcttccccgagtgccctgggagagccacattcctggagcccagacccagccccctgcagggcttgatgcactttgcggagtgaatggatcactacggttacctggccccaagcctgccaggcagaaccctttctatgtgtcgtggcatcggtgctcccaacagccctatgagcttgatgttcttattaacttcattttaaagatgaaaatcctgaggctcagagaaattaatacacttgcccaaggtcacacagcaggtatctctcaaagtcaataatcccatccaagtctgctaatcccaagcctgtgatctcagcagctgcacacactgctccagcctgtgccacacaaagcaagtgcccattgcaggcagtttttaaaaatcatttttaaagtaaggtatatacacacacacacacaaatatacttatatgtgtgtgtatatatatataaataggatattatttatatatataaaaacagggtattatataaagtaagctatatatatatacagggtatttaaattaaggtgtaaggccaggtacggtggctcacgcctgtaatcccagcactttgggaggctgaggcaggtgtgttacctgaggtcaggagtttgagaccagcctgaccaatatggtgaaaccccgtctctactaaaaatacaaaaattagccaggcatggtggtgcatgcctgtagtcccagctacttgggagcctgaggcaggagaatcacttgaacccgagaggcagaggttgcagagagccgagatcacatcactgcagtccagcctgggtgacacagtgagactccatctctaaataaacaaataaatgtgtaagcaaagtgagtgacagagcaacagggtcttgctgtgttgtgtggatgctcctgtttctccatccgtgcccggggaaagggcgtgtggttgtttccagtttggggcagttccgaataacccctctgtacacatttctgttcaggctttgtgtggatgtgaggtcttacttttctttgagccggtttgctggatcctacagcaggtgcctgttccacttgggaggaagctgccacacttccgcacacagcaccttctgcatcccaccagcagtgtggaggagccctgtcttcaggcgtattttttaaaactataaaatgttttttaaaaacacatcacgtaaaagttcctactgttacgggatcctggggtgtcgctttgccagctagaagcctctgtgactgctggtgactttgcccgagttttgctggggcctgctaggcttgttccatccactcagccaggcaggctgcactcggctcatgctaccagcctggatcccacacctgctgagggtgagccgggcatggagtggcaaggggtgtgtgagtgagcgtgggatccggccactgttcacagccagccatgccagctgtggcggggcgggcagctccagacaccagcatgggcaccggctccctgtgaggctgcagctggaccaggcggaccataatcagcttccatggctgacaccagggaacgcagtggtgcctggaagcttggagctaccaggaactgcagagccctaaagagggtgtcacagccctggctccgggagcgcctaggtctgggctccccggaaggccacagctcttctctccttctctcttctctccttcttgtcaccctcaacgtgctgagcaggggtgttttgtgttacggctctttcagccccgccatttggtgggtctcaagttcctgtcctgcgaccaggaagaatgaggtatgcagacaagtagagggtgagcaagatgaggaggagccttactgagtgttagcacagctcagaggagacccgccgtgggcaggtcctctctgcagctggttgtcccatcatcttttctggtctggctgagtctgggactttttatgggcctcaaagaggaggaagtgcatgctgattggtccatgggtggccatggacgggcctggaaaaagcaccacaagttcccagtctggtccatggaaccagcagcccagcccccaggtttcaggccctcccttgcttaaaggtgggtcttcaccagggactcacccctttccaccagggagcttgtctgctgctgttcactgcacccaggctgtttgtgccaaggggcacctgcagctcagcaccaagctgccctcagcatctccctcgaccaccctcacatgctcattggcgcccaaaatctggagggggctgaggtggcagggggctggcatgtgagcgctgccccaaatgcacgcacaactggccaggctgcaacagtgcccaggctcagcctcagctttcctccatgatcagggctggtgccgacagtgggaagtcagacagtgggaagcacttctgggcctgtggggacaggggggccttcccgggctcccaagagtgcagggatgcctgggtccacagccatggcttgggaggccgtagctatgcccgggagggtggagctcttgcctgctcccagctcccagagcacggggtgaccaggttgcagctgcggtttgggtggccgcagttgtgcctggggagctctggccaactctgtggagtgtggcaccaccctgggggccagctgtgcctcaggacccctctctgcccatccctccatgtccaaccatgctgctttcctgccagtgggtgacttggcccagccccactgcggtggctcccaggggcagccggctcggtggggtggggggtcccaggagtggggactgcctgcctcctctccgtgtcttccctgcagtggcagtgggcaaagtgcaggtggcgaggtggtctcaaccacctttgcacaaatgaacccgacacactcggggccggccccgcaagtcccgctgtgccttccaccaagtgctcaggggttcccgagacacagtggggagtgaggttgaggccgtggtggaggccctgggcctgggagtgggtcctgcccggctgtgtgagggtgggggtggtgcagtcggctgcctcggggacgtggggcacggggatctcatcaccgccattgctgctcctgcagccactcctgccaccactgccggcaccttcctgctgcagctggtgtgatggcagcagccgctccagacactccacatgctgcagccatcactgcctttggcatgttgaagggtacagttcagtggcaccgagcccattcacaacgtgaattcatcaccaccatccatttccagaacactttccatcttgcacacctgaaactctatactcagtaaacagtaactccccctttttcctctccccagcctctgacaacccccatcctactgtctggctcagtgaacttgactagggacctcctgtaagtagaatcatgcagtacttgtccctttgtgactggcttacttcactgagcagtatgtccccagggtctttccatgttgtagtaggtgtcagagcttcctttggttttaagattgagtgatatccccttgtgtggatggaccatgcatctgtcaggagacaccgtgttgtgtccacctttggtgattgtgaatatggctgctacaaatagggatggacgaatatctcttcgtgcccttgctttcagttttgggaggtatatacccagaagtggaatttaatttttaattttttgagaaacagccctaatgctttccacagtggccgcaccgtcatgcgttcccatcaacggtgagtgcaggtgcacttttaagaaatccctggaaatatgacatcaaaacaaaggcagcacaaacgcacacacgcgagacagcatcagattaaacagcttcagcacagcaaaggaaacaagcagaggaaaacaaatatttcctccgggcaggagaaaatgtttccagtcatacattgataaggaatggacatccagatacatgtgggactcaccagcaagaaaataaggaactcaattttaaggcaggtcaaagacctccacagagatttctccgaagaagacaggataatgggaaacaggcatatgacaaaagtgtcccatcagcactcatcagggaaatggaaatcaaaaccaaatgggctattgcctcacacctgttaggagggcaattatgaaaacacaaaagccagccagcgttggggaggatgtggacaagaggaaccctggtgcagtgttggtggaaatgtaaattagtacagccattatggaaaacactatggcagttcgtcaaaaaattaaaaatacaactgtcctaggatccagcaatccctctgctggggaggcacccaagggaagtggactctgcacctcggggagacatcagcacccccgtgttcactgctgcactgcccacaactgccaagatatggaagagtccgatggcagatgagtgaattttacatatgtagtgtagatacacagcggagtactactcagccatagaaatgaatgagattcaggccaggcgcggtggctcatgcttgtaaccccggcactctgggaggccaaggcgggcagatcacctgaggtcaggagttcgagaccagccaacatggtgagaccccatctctactaaaggtacaaaaatcagccgggcgtggtggcacatgcctgtaatcccagctactcagaggctaagtcaggagaatcgcttgaacccgggaggcggaggttgcagtgagctgagatggtgcctgggtgacagagcaagactccgtctcaaaaaacaaaaaagaatgagattcagtcatttgcaacaacctggatgaacgtggaggacattatgccaagtgaaataagccaggcacagacagacagatactgcgtgctctcacttacacgtggacgctaaaattcaagttgaactcatgaaatccagagcggtagggtgtttaccaggggctggagggggcagcagagacgccggccagagagcacaaagtttcagctctaagatgagtaagttctggagctctgatgtacaacatggtgattacagctattaatgcatacttaagaactggaaagagtgggctttaaatgttctcaccacaaaaaaatgtaagtatgtgagggatggtcgtgctaatcgcttctcgagccatttcacagagcgcacgcgcgccggaaaccatgtggaacattttatggagcatttttacctgtggatttttaaaaaatgaattaattaaaatttgaaacctgaagttcccagaaggcagggagtcgggggctgtgaggcggggggcgggggcggccctgttggctgcccttactggccgcagtcttcccaaattcaggcttgagagaggctgaaagagggccctggaacgtgcattcttcccagcaccgagcctcccctgcagctctggcgcaggcagcagccactcaggcgtcattggctaagatcaagaggatgtgccgtcagtacaggaggcgagaatgaaccaagacccttgcagctcctcagacacaggaagcgcttccaggctcggggagtggggtcctcaagggagggggggcagaggcaaggctggggcaccaccaaatgccaagtgccccagtctgacactcagaaccagcccaggagaaggggaagttggctgagaacaaccaggcccagccaaggcccccagcctccggccccgggacggtctccctgaagctcctagcgtacccccttattttctcccggaaattgtcccatgtcacctggcctagcctgccctgcctgccgggagcctccctctcctgggaccccacccccatccagaggccctacccagagccacggggttgtgaggggtgggtcagcttctctgggggctccaggcctggggttcagcggcgtcctcctgctggtggtagtaggggtgctgggggcatgagcctcctggactgagcgggggaacccaggggcatgctggccaagggcagtcctggacaggggtcagcggggtttggggggtggcagagagggagggcctgagctgtgtgttggatggtgacacctctggtcaggtggaggaggggcgggagacagagacagagacggatagtgagggtgggaggcaccagcgggttggaggccccgtcttcccagcccctgacggaccatcctgggagatgcctggtgtggtggggcctggctcgggacagatgtgccctgggctgtgattgtggtgattcctgctgggtgtaaggggccacccggggagccggcacccactcgggaggaatgcaccctgccttaggacaggcccatccaaagaaacagcgcttctctctcggtggactttttaagacaaagaaataggtgctcagtggaccaagtgaggagcgtttagaaggtggcaccttgtcccgctgccctgtgtccctccctccccactgggctgtcggctggtgcccccctccctgaaagagcaccacggtttcagggccccaagctgcggtgcagcctgctctctgggatggcagcaaggctgagcatttctccctcaataatgcccaccactcccaacctgtcactcactcgaccgctccccacaggcagactccaggctgtttgcagtttgctgagccagggtcgcgtgcattccatctgatgacaggcaatgtcaggttattctcccaaaaggccctggcaggttaccccacacccaatccttgctgatgtcacctttgccagctccctccggggacctctgagacgtttctccaggacaaggaacagcacgaacatgtcagcctgcgtggatgaaaccgggaagatggccgcgagccgtgtgcccacacaggagtgtggccatggctgtcggtgtgaggctgtagctctgtggaaaacgcagaccacacagtacagaggcgaggccgtctccagagctggcatcatcaatgtggctaccatcgggcaaggccagaagaaaatacggaaaataggaaaatcgctgctggactcatgtccttgggccttcagcaaattttctcctttaaaaatttcctttaatactgtgtaatgttgcttttgcgaaaataaaattcccgggacaaaaagaggaggcagagagaaagacagaggcagagagagagagagggagagacagagcccacagtccacccgcagcccgcagcccgcagcccgaagcccgcagcccgtgggggaagaggagggcgcctgcaggcagcagggggaaggctgcagatggggctggacctgaggaggggctggggcatgggattctctgagcccagaacgtggagaatgcctcgctgcagacatgaccgggggctgtgcaggacacagacggccacagaagccagggtgtggccggggctaggcctgccctgaaggctgccgaggcggagtaggtgacggtggggtgaggacttgagaagcaggggacactttttccagaggaagctgctctcccaggggtgcctcagtggagcagagcgaatggagcgaacagactgaattcacggcattttaggacgggggacctggtgtgggggcttggatggaaagacagggaacaggataagccctgggaaggaaagggggatgtggctgcctcttcaggggccggggtgggcgtctgcccaggagggcagcggaggaggggagggcagtgcgggtagggaggggaggtggccccacagacgctgggagtgcccaggttttctgacaacctcagccgcttggctagagcgtctggaaggatttgcggggagcatgtctgggggaatcgaggctctgtgacgggtgacggcacaaaggggcccagcaggcctggctccagcgccagccagaggagtggccgggggatgagagagcccaggaaggcaccccagggaggtgcagcacgcgccgccgactcagccctgggccccgtacgcaggagccacccccttcctgcagatggaacaaaccatctggggtcaggaaattgagctggctcttctaatctcctctagagctccacgttcctggggtttaagtagaacatccaggcctctcagtgagccagaaaagcccatttctaccttgtgatggggaagatgaaaattctgtgagtctcctacgtgggaaagggtccggcttgcctgcaggatgctgactgcgtggcacctaaacacagaaagttctggaagattccttgcccctgtgtaggcttaaatatcgttcactagctctgacagtccacccaggccctgggcaacatgttccagggcagagcaggttggcacaagatggacatggtcatggtgccttccacggtcacgggaccctggggacagcagacaccgcccaagaaggaatctcagggacctgtgggcatccctgtttttgtgcctctgggttctatcacctgacttcccccaacaatgagctctgcacatggccagggatctctgcacacgtccagggagctctgcacatggtcagccagctctgcacacggccaggaactctgcacaccatcagggatctctgcacacagccaggaactctgcacacggtcagcgagctctgcacacagccagggagctctgcacattgtcagggaactttgaaagggctgggcaggtcaccttcctttcacccccaagtgagtgaggctgcaatggggtgtccatgtccttggacaaagctccaaagcttctagcttctctgaagctcacagaggtgtcagcttggtggggaaggtgccaaggcagggccctggagatggggacagggactgcccacttccatttgccaaagtctcagcaaatgaaacatgagggaatgaatgctcaaagagggctgcaaacaatcgccaacaaggtaaatgattacatttaacgcttttactgtaaacactctcaatgcaatataatcttgctagtcatgctgggtgggccgggatgagagttagcagaagacctgatgggtctgtgcctcggcgggtccggactgcatgcacagttgtattggaagctaagataatcactcacctaacacgaggcccttccagaatgtgaggtctcagccaagtgaaccctgtgaacacctccacccccagacccgcggggaggctcaggagccaggcagaccgaggcagttccagaagcccttgggctggcagacgtttgcctctttgtaagtaagagtgtatgcagaagacctcacaagcagatcaccagtgaaattcagatgacccttctagagaggctgtgggcagccaaggccccaggtgtggacagggctgctgctctccaggtgctgggggccccagcatgtctcttcctacagctccatgtgcctttgccacggagccaccggcattcagtggcctcttccccacttggctgctatgtgtcccctggaactcagggcactccaggtgtcctcaggtcatgtctcagagctcagggccatctcgccaggcagggaagtccagattccaattttttctaccccacacctaatctctaacagcaggctctgaacacacaggaatcagttggtggcttctaaagagaacatgataccgtcatgtagctgcctgtccagacgctgaagcctgtgctttcaccggaccctagtgcttgtgaatgacgacctctgttctcctgggtcaaaacttccttcaccaccgtcaagaaggccaccctttgtcggcgggttaaatgcagtgttatttacatatggtttatctgggcatctataatcccagggcgagagcccaccatccaccagcattttggaagaacgcctgagacctgagacctgagacctggtgcaatggaatcagattccctggtagctgcttttaatggtgacagattctctgaaacagaaaaagattgaattgagtctgtctccctggagtcgtcctgctctgggagatgcagagggagggcggcaggagggaggacagtgggaggcctctgttggtcaattgctaggctgctgtcaccagatggtggatggcgtttgtacagcactggccaagggcccagctcagcagggccagagcctcaggtcatgtcgcaggtgagcaaagcagcgtggatggaagacgaagatcttcgtcccacggagggcttgctgtgcgccccgcaggacgcagatcaccgggaagagcaggaagcagaagcgcaggaaagccaatgctgtgactgaggcgtggccagcaagccaggccctccagccacaccctgctccaaaggggctccgacaggatggactgatgatttccaagagagaacatgctttttatcttctatggaattttgctaccaaagagcctcccagctacctgtgcccttccctaacctgacaatcttaattcccccatgaaactcctccatcgcggacatttggacaactccaggctgagtttttcctaaggccactctggccttgtgcgtctcttctttgctaagctgtgtgccagccgccagcccacatctgggttgtaccatgatcctaactcctcacctgaacacagcatttaacagactgaaacgtgccactctggagctggggacttcaagccacatttcgcctgcagcccgatcgccttcaatctttagcaaaatcctctttctcatgcaaaacagtgcagtcgtaacttttaaaatattttttagaaactttctctagagcctccaccacatggccacagcctgagactttgaaataatgaaacaattaaatgatgttttcatcatttctgagacttgcccattatcacgaagctgaaatggccatttttttataagtcaaggaaggacaggcagtttcaaatgagttggctaagacatacgccaaattcatagaaaatagaaatgaactatgactacagaatggaagcaaccacagaaatattagcaggattttaagtattatcccaatcaagtactaatagctaagtgaggtcattttttggataccattcctggtcaaagctaggaatgatgtgtgttccaggctggaccctccaggcagaggcaccgggatcccacgctgtttctgggttggccattaacctgccccttgacctgacagcgtttctctctcttctctctctacacttctcttctgatctttagatcgattttcctccaagtgacaatgtccataaagagagagggaggtggaaatacaggctgtcacatttcagctctttgaggtgcctctaaagatgatgtcagagaacagtaagtggcccacaaatgtgcagcatctgttccgagcctcctgaagccgcccggacaggcagcagtacgaccctgcaaggccacaggggagccagggggttctcgctttctttttcttttaattatttcctctcaaaaaagaaaaaaaaaaaagaaaagaaagaaaaaaagccctgctgggatagaacttattgagttcagaatgttccagggcacataatcaggctgcccttgttccaagacactgctgtgctctgtagctgacccccgagtcctctagggcaagagtaaggacacagtcggctcccgaaagctggtgcagatggaccccaccacgcagggcctggagttgggccagacctgcagacccccttgatggcctgcggcaggacccttcacctgggtcaaggcctcctggtgctcctaggggcctcttgaggagcctgggcaccagcatttgcctttgaggacaggactgagggcctgcattttgcacgaatgtacctgaaatgtttgctctggatttacctttccaatggtgcctatgcaggaatcccaaagaatgcctggtggggtctgaggcgggtctcaggccgggagccctccacaggcagcaatatttggctagaatttaatgccattttgtttctttttatctatttttatggtgacctctttgtggtaattgacactgactttttaaaaaataaacttacccttttaatcaaatgtgtgaattgtttaaaggaaaaacattgtgtaaataatgttttcagggggtagaatccagacgtgagttttggaaacagagtccagtcctgcttctgacatttgaattgcttctccagcatcatcaccagaagatgggctacctgtgctcacaagcctcctgtaacacggagctcaccacctctcaaaggcaccttctgtcaggtctgcctggaaatgctgctcccgcagactccgcacctgaggccaggtctgcagcgaagctcatccacacctgaggccaggtctgcagcgaagctcagcccccttccttcacaggagaaatacttctgggtgtgcaccttccactcctggcagggccgtgagcccctgtggcagtgcctcaccctctgggagggaccctctccatctgggaacaatgtgggtacttttttctcttaaagggcagtgtcaggaatgaaagcagatacccaaaagcagtgggtctcgtggcctcgtgtctgcttccagaagtggagggcggcctgggacggcgggagccctgaggacaccaccgggggggtcccgggacctgatacgagtgggcaggagccccaagccctggaggaaggaaaaccatttcataaataactgcatggggttgtgggccttttctcacaagccgcagcacctccttcgtctctccacggtgaacccgcccgccacgctatgccaccaggccaggtcctgcagcaccgcctccgtggctaggacttcctcaccagcctggggccgtgaggtggtcatttccccccttacctgacttatctcaggattcacacacacacacttgactttcggaaacttcttttaaattaatttcactgacactaaaagggaagctttgtggagtgtgattgtggttacctgttaatacttggcaacaattatgagccctgatatgagccaacttcttccgtcttatcccctttgaggacgctctgttatcgcccccattttgcaaacgaggaaactgaggctcggaggcctggagcaatgtgttccaggacagacggcaggaagccggggtaggaattccaacagggagttccctctgtggaagggaacgtggctggcacctccctgccttccaccctcagagctagtgtgaaaaagaagacggggttatggaaaaggcaacgggctggagattccccggattcccaggctagggcgccggtctcactgtgcgcgcaggtggggcgcgtgccagaacagggcctgggggtcaggccgagaccggcgggcaccttcaccagggccgcccgtggcgttcccccagcccctctgccgcgggccccacgtggccccgaccctgcggcagcctttcggaagggcggagctgaaaaacggccgcttggctccactcggccccacagcgcccaggagcgaatcccgagtccgttcggaaccgcctcgccgcgtggcctggggcggcgtcgccaccgcgcgttctcggcctcccggctgcggcagcgatgccggtccttggagctggagcggggagtccaggaggcggcagcgctccggagagagacgccctggtcccccgccgcgcgttcccgcctctgtgccctgggggggaggagggggcggtcgccgctgccattggccgtggggggtgaggcgggccccgcgcaggaaaccccgcccctccctctgcggcgggggcggccccagcggatgaatgaagcggcgcgtggctgccggggaggccagagcgtggagcgctgcgcggcgcggcggccgggccctcgagacggggacggtgagtgcgcggggagcggggagctggcgcgggtgcacagggcccgacctgctggcgtaggagcgcggcaggtgccgccatcgtgggcaggggctggagcgccggggggatgcgcgcgggggcgggaggcctgggcaccggccgagcgccccgagcctctccgcgggggagggcaggaccgagcggaatcggaggccaaattcgccgcttcccgccgccggctgcgcaggtaggagctcccgagtcgcccgcaggaggaccgaggcgaaggggccccacgctgcagcgggtgccggggggaagcgggtgagcaggggctgcggccctggcagggactgtcggagtggccggggcaggtgacctgggcaggtggcccggagcgcgcgcaggcgcaggccccacagatccagctggggacgaacgcgcctccgcggagctccagagttgcggagtcacccacctgcggcggccgctgctgccgagtcaaggaggaaaccttcatgcacggaagtttctcgggggcggccgggctttgttcgcgccagaggcgctcgagacatctccgggaggggagcgcgggcggagcgcacagggctagtttccagcagcggcggcgcccctttccctgccccaccacgcgacgtcctggccgtggcttggggggacccgggcgccctccaggtgcaggcagagggtcgggtgccctcgcgttgctgttgggctcccctgaccagggaggatggaaaggaaggagcaggcaggcttagctgccctagaccggccctagaccgggaacctggaagcagatctgacttccacttccaagggagaaaccgcctcccgcactggcgccccgaggggagagagaagcccagctaggtttccgcgtggtccgcgtggttggtgaaccctcaggctggggggtgccccgcttggcgtgcaaggccctctttggagctgccgtgggacctggctatgcgtcctgtttctgtctggaggcggctggaacgcggtagttttccacatccatgcaaccagcttgtcagctgctgctcctcagctgtggtttttggaacttgggttacctccatctaatcagaaactggctctgcagagcccggtgtcagcgacgttttcattcccagcagcgggagcaaatggatctcagaggacagctccttggccttagccggctccgcttgtgaatctggtaataatgacaaggacagtgacagcaggggttaggtgttgagtgctggaatgtgccgggcatggtacccctgctttgagcatcgtctcattcagtccctagcaaccccacgaggtggccattatcactcccactttatagatgagtaaactgaggcaccaagaggttaagtgattgactctaggccacacagcttgtaagtgctgaagaggtctgactccaggtttgtctgatccaggcttgggctcctgttttacgactctgttcttaaagaggcaaaaggcgactgcagggtcaggccggagacccagaacagcgtcccaagagctgggcctgcggttactgggccagagtgtctgttctgggttgtcagtgatcgcaggacaccagtaggatgttgctcgggccgagaccacacagcccgacttccctctgtgctgctggagggagccagggcagaggccggccactcggtgagacctggacgctgaccacagccaggctgccctgaccgccctcagcaggctgtgtcctgccttcctgctgggcaaggtcagcaggtggtgcctggaaaattcttcatgagggagcttccctcccgagtggccgtgacctaatctgtagctcactgggtgtggcccctaaagcaggtgctgggcaagtccctcccatggtggagagctggctgggcacgtggcaggcagggcaggctgggccaggtgaagggtggccaggtggatggacatgctctccttgctagactaagcccagagaggccggctctcctcggggctctgatgggccccttggcttgaccaagccccattgcagttttggctccaggtcggtctgacttccaaatggcaaaatttttctcagcccattgtagaatgaaaagttaactcatcgagcttagtattgtgcctacaaggtcttcgatccggatgtctccatgagtgttaatccatttctggggtgggtactgctgagccaatatacattcctggcttcctggactcgtccactggaacgtgttgggtcctggtgctctccccagcagatggttgtaggtggtcagagatgagccacagaaaagccaacgtgcagcctggtgctgggggcaggagggagcagggcccttggagctctgggagagagccacgccaggccagccctcctgcttcctcaagcgggctgtggacagaggccacaaaacgttccctcacgagccacatgactgcctcatttgcaagtggcaaggtgcacactgttggcttttggacaaggacatgggacagtcctcagaccttgctgttgccttcgttctgggacatggaccactgtctggccccccagtgagcttgctgagtgtcagctgacttcaggcaggatctgggtcttgcccacttgttggaatgggcacgtggggattgcaccccttgaacagggagggaggtgccagtaactcacatgctaggttaacaggttctgggtgactctgagccttggccctgccaggggtgtgaggaggaaactggccctgctgctgggacaacagactctgggcgtgtcctcctgtgggcctctgcagaggaagcagactgggactacaaagaacaacctggtcctggggaccctgctgccttctctggcccctgctggcccttcaggctacggtgagggtgagggtgcgggtgaggatgagggtgcgggtgaggacccacccacacccgcaccctcaccctcatcctcacccgcagcctcaccctcagtcctcagacactggggtctccggctgtctccaacccttcagttcttttcagtagcctccttcccaccagcatcacacagaattagaccctgggactacatttctggcggaaggtgactgctttttcaaaccacgtgccttctgcagaagccgctccccacgtagcccaagcgtagggtgagacttggcaccagtggctggggtcgcttttgggtgccagagagcccagattcctctccctcccacgcgcagccaggcccttcctgcccacggaccttgccttttcttggtggtttttctaatctggcaagccttggggggcacctgaggcattgcccctctggcccaagccgcagggagagcttgcgatgctttgggtggcgtgtgtcgtccagtctgccccaggctcacttggggcccttgcatttgccactggactctgcctttcgggaggcgctgtggacctgagatttggacccatgggcctaggaggccacctgggaggagagtggcccagctgtgccaggcaggttcctcatctggacagaacctgctccctgcagcctctcaagctccccgagggcccttctgggtcttgtctctcccacacattgggggtcaggtttgagcccctttgctggcggacctctgagctgcccgcccttccctcccaccacccgccctgcctcctgtggtgcacagggctctcctggaggagggaggtcctgggcatcccctgcctcctcaccttcaccctcaggagtcccagagccctggctgctctgcacagcaggctgggaagcaggccctgtgcccaaggactagcctgagaactggggaggtcctttcctcttccccagaggacaaagagagctgtgaacaccacgggtctgtaaaggggtccccccacatgcaggaaaacatgagttgtggcatcacttacgccttcactcaccagtagccgaggcacagcgggggtcctgagcatgggcagggcaagccacttccaccccagccatggaaggaggctgaggaggccagggcagcagtggggacctgcggcaggcagggcctgcagggctccggggccggacagggtggatttccattctgagtctgtttcccatgaactccagtgctgactgggcccactttgagtaggacgctcagtggctcattctcattctcatgatgtctctgttatgggtggaaactgaggcagagagaggcccgtgacctgcgtggcttggagccagcctccgtcttcttctcaaacatgcccttgaatggcaggagagttttcagttccatggatgggatgatgagtcggaaggaagagtaaacctgcacacacccgtggcttcacccgtcctccccacgctcccaggttcagtgggtggagactgggtgcaagcaggttgagggacaggtccttctgggctggccctgctgccgcaccctggctccctcttgctcagacaatccttcattgtcggccccatacaaagcaatggcttcctgcctgctcgcctgtgcgaggtcaccaggtatgcaaattggggtgtaccaggcacagctgaggcccccatatgctgatcccagagtctgtgcctcaagctaaagaagtgaaagctcctttcattcattcatccagcttgaggaagagaccctggagtgaatttggagatagaggagagagtcccaggtgtcttggggggctggtgtggcaggggaggcagctgaagatggtgtggggagcaggcaggtgctcagggcggggctgggtgcagggcaggcatgtggctgtggctggcagcctcagagccgtcaggtgccaggaggagggactcggctttgccaggcagtgcctgggctggaatctgaagagaaaggagaactgagaccctatggtcctgcctggcctccaaattctgagtggggcctggaagccgggactgggacatcccctaatgtggaggggtgctacccacccagcccagctccaggcctccctggggacatttgctgggccacagtaggtcagccaggccaggcccaggggctggcaagcttaaaatagttttctcagagatcctgcgtcctttccacgcactgcgctgagagcgctttgcagggagccaggctgggaagtaagtgcatggggcctagggaagtaggtgggcttctagaagtggcacaggccgggctgtgtcagctgcccacacacggggatacaggctggcaccccagttcccacagtctgggctgtgccagccacccgcacgtggccactagctcctcccaggtcactgtcctggcttgagaggagggggaggaagaggtcagccggattcgcctctaaaagaccctagcagaggagtcagggcctcctatcccggagatgcagctgactgaccaggccagcatgaggaaatcggaagagaactctggcccccatggcctcctcctaaaatagcgggcactgacccatacacaggcgcacacgcacgcatacaccctccccaggcctgcccccagccggaggctccagggacacattatcccccggctgatcgccttggcctaattcacaccctggctgccaaggcctctggcagcaacatccccccttcctcccctgcggggttgttgtgggttagagcagggacagggcctgagggggctaagctcccagggaaagggcagctggctctctagatgcaccggaggggcggggtggtttgcgtttctctcgggctgagagccacctaaggctccgcctcagatgttctcccatggacagaggcatcagggcagtggggaaaggatgggccgagaggtgagtgggtgccctggggcggggcagccacagggggcctgaagtggctcacgggcggggccaccagtcagggctccgggcctgggcacatgggcaggctctgcttccaggggctccttcccacctgccggctgcatgggagccgtgtggccggagccccaggggagaccttgtccctcattctggagcagccgtcaggagtacaaggccatgggagaggaccctactccatggaggtgatggaccctcctcccgtgatggggcagatttcagtaactgtgtgtgcacaggagagctcagctggttcaggcctccagaaggttcctgggcagcgatggtggtggtgtgctgtcagagcctcctccctaagcctggctcccagggccttggctgatgactggaattcactccaggctccgggcctcttgtccccaccggccaggcggttctgattcgcagccatgggcagcttttgcacccagctctcgagtgaccgcccctgggctcctcgtgggtgcgacagtgtcctgggagtccctgaagcccaggtttcccacatagcaggcgttaggaagtcggtaccaaagtatggaaggactggcttgtattagtctgagttatccagagaaacacaaccaacaggataggtggaaagagatttatcctgaagacctggctcaagcacttatggaaggggcaagtcccgagacctgtcgttggcaagctggaggcccaggagagctgatggtttcggtccagtctgagtctgaaggcccaagaaccagagaaatgctgctgcaggttccagcctgaaggctgaagacccaagaagagctggcatttcagtccaagcccaaaggcaggaaaagaccgaggtcccagctgcagctgtcacaggaggaggccctctcactcagcctttggatctatgtaggcccccaactgattggacgaggcccaccaccctggggagggccacccttcacatgctaatctcacctggaaacacccacagcacacccagaacgatgcttggctaaatgtctaggcacccaaggcccactcaggttgacacatgaaattcgctatcacagtgctcttggccctgaccctgagaccatcgcacatagcgtcagaggctgtagagtgggccctgcagaggccaggaagcagatgccctggtgttagatgcagtcagggtgttcagatgaggatgacagtggactcgacctgggatgctgacaggagccagggtggcctgggggctggccgctggcctgtccttcacagggggtgcagtctcctgcaccccatggctgtcccatccctgccccgggtctcccaccccctcctctgccacgtggctgccactgcccggccttccacaactgcctttcagcctcaccccatctgcagactcctcatttgcagcaccggggttcacctgcatctggcctcatcagcaggtgcagtcttatctgcgtataaaccagcccaccccatgcagccagcttgggatgagaggacggtcatggggtccccgtggcccttggagggaggcctttggaagaggcaggtcctttgaatttggtctggggtcaaggctgcctgcagctccctccccagctccgtagtgggggctgtatccatgcatcagaagaagctgctgccttttccgggggaagctgagggtgtggatcggaagaagccgctgccttttccaggggaagctgagggtgtggctctgggatgaggatgaggctccatccttcactgttacagggaccagcttgggaagctgacgcacctttttgtcaaaaccaattccaagtggaaagaaactataggcaggtgtgcatgtgtacacacacctacacagacgtgcacacacaggatgccagaaagaagaatcaaaaggacaggcctcccttcttccccaagcccagctgcaatgtcctgttccccttggtggggccagtccaggggctaggcagcctctacgtggggctgccatgaggcccttccagcccctgaaactcccctgccccaccccacaccagcttatccataatgggcctgagaccagaaaaccaaaggtgtgggctgccgagctgcccgccttaacgcggaccagacatcattactccagtctccattagcagtgaacgcagaggtgacgttcaccttctcactgagccatgagtgcatctgccttggccatctcggaagctagcagatcgcagaaggaaagcaacatgtgagtggcgcgggtggtcctcatgggccccagcagcatttgtcattgatggaactgatgaccgagaccaggatgggggcgctggctgcctccaccaagcatgcgtctggctgtccacattgctggactcggctgctgcggctaagatgctttcatgtcccacgttgggctggttttcgtggcaaacgttagccctgaaatgtaagtcctgcaccgcacgttcagcaaggactccctcaggtccgggccaagccttgacatacatgctgggcacccacttctccaggcagagttctcatccctctggctcaccagctcagaacggcacgctcagtaaatgccagtgcttaggacgtatccatgtgaggtcttggtacaatcctggaaacttcctttgggaaatgcatgaatgtgggaccctcctcatcgccctgagagtccagagtgttgcctgcccagcgtcactccacaacccatctgtcccctggatggcaggagccaggccagacgccccatcatagccagcttttatgtttgctcctgttgtcctttagccctgagtcatggaaggcccaccctcccctttccaatctagacaccgctgttttaatggggaaacggcctcccagagaagatttccagcttcagaagagaacccggagctgaaactcttgggcatgatgaagatggaatgggtactgtcacacacatgctgcttgcgtgagattcagataagggaggctggcccgaagccaggtcgctgctggatctcagaaagacgtcagaacgaggccccaacggaagcccctggaggtgcacagctggtgagctgagtggtgccatgtaattctcatcgtctgcggccgtctgatgggcatctgtcggaagccacatggctgatatttaaaagaggattttaaatttgctgatttaaatgtgcataataggtaactttcggctgagctttacatatttatgtcagagcttttaattcaggtaaaacagccttcagcttggagctgtttggacacctacaactacctgttctttctcagttgtggctttcattttcaagaaggaagtccttctgtttctctgtggccattgctggtcacgaaacttagcaatctggcttcctctcaaagctatgcagacgggatcctcccccttcccccttacctgctttggccccagcgtctggtcctgaggccagggctgaacaaactgcctgtatgaggcaagcccagtgcccgggcgttgagcgggtgtttcacggcagccagcgtcttggttcgcaatggtttacgtgggcttgcccaccattgagcatcccagggaccccatcagatcctttgcagaagtgctgccgaatccgacccactccccctgcccccgcctcccccaccctgccccgccccacaccccccacccccgctcggcccccctccccgtgccagcacgtgcagctaggcggaacctctgagcactctcccgcctgcgtcaggctgttccttggccctgttgaggctccttcccttcatgttctggcccagcccggaaatgaggtcaagtttctgctatttatgtgtgtgcgtgtgcacgtgtttgtgtgtgtgggtggaccttgacctccaggcagtcctcagggtagttcttggctctgtgttcctgcactaagaaaaacaatgcgagggaaacacacccacaggctgcctggggagtctgcgtggctctgagcctggcctgtcctcctccgggcctctgaggttgctttctgtttcggcggccggcggccggtggagcccttgcgcctcctcgtcagtcccgccccggggctcttgctcctccggcttttccgctgactcctggcattcgagttcttgtgttacacatgctcctgggacgtcatccttgtgacagctcgcttcagtagaaagcctgtggctcgtgggtggccgtgggtggctctctgccccttggggaggcgtggagcattgctcttacaatatgaatgtctctccttccacgcacactccctttctgacgcagcaggtcccaaaccagcctggcctgccagctcgtggataggtgttggcattgtaaataaacccccgggtgtggccgcgggcacccagggagcaggccccaggcatgaatgctgtggaatctctgctgtccgaggcctccaaatacggcctcaaacagcctcccggcagtgtccaaggtcaacagcggctgcacgtgagtgccacacgagcgtgcacggctctttcagtaggtgtcagaaggcagctgtgacgcagacgcttggctctggggccagactgcgggggctgcatcctcattgccaccggcgggctgtgtggcctcgagcaaatgactgacccccctgggccttcttcccctactgtgaggcctgggacggtgcctggtacacagctggtgctcagtgtgcacagcgggtgttagcaccctgccacccagcgggattcttcacagcagctgcccgccttcgtcccaaggagcctggggctgaggcatccattcgctgagagggcgagacctccgattccacagaggagccctgtggggaccgcgcctcggcagaggacgtggcgggaggacccagagcccagctttgggggctcaatcctgagatccctgtggccttggggaaggggtgctggtaccgccagatctctccagacgtaaaacaagccttgcctggacctgggggagatcccatggcctgctcccggcctgaccatgctgggcccggtttatctgccttcacagatgaagttgcccctttattaaaaaacaaaacaaaacaaaaaaagccagcaatttgtcatccccaaatgctgtagtgtctgtcagcataggcctgtcccggggctggttctcactgaggcccctgtgtcccctcgcagccccatggcggatcaccggctgcgcctccgctcccacccgccacgctgaccttagagttagtgtgtctgttaagctctaactctgcctcaaccccaaggtcatctctctgggccctcctcaggcctctgtcatctcccaaattcgggggcatatgtgacacctgtttgcctccgtgggggctgctgtaagaaatgaccacacaccaaagggcttaaaaaatagtttattcccagccaaacactgcatgttctcactcataggtggaaattgaacaatgagaacgcttggacacagggcagggaacatcacaccccggggcctgccatggggtggggggaggggggagggatagcattaggagataaacctaatgtaaatgatgagttaatgggtgcagcacaccaacatggcacatgtatacatatgtaacaaacctgcatgttgtgcacatgtaccctagaacttaaagtataataataaaaaaaaatagtttattcccaccagctccggaggccaggaacccaaagtccacacaggctgtgctccccctggggctctgaggagggtccttcctgcccccagtggctcccggggctccaggtggtcctgagagcgccacgcccgtctctgtctctgtctgcaggtggccttctctgtgtcatcttctcctctaaaaatgcacctgtcaccgggtttagggcccaccctaatccaggatgatctcttctcagatcacttgtcacatctgcaaagacgctttttccaaataaggtcatgcgctcaggtcccaggtgaacgtgactgcccggggaacacggggggcaccggtccgcccaccccagccccagcgcaggcccagtgagcagactctgtgaggagctgccaggaggatcctggggtatcacccagcccaggtccccacgggactgcctgctgtccctgcatctccgtgcatctctgcgcgtcgccggctgtggctggaaggagaccccaaggccggatacttagggcttcggactctgcagagccctgagcatggctgatgtggccccggcctcagcctgatgtcagtgggcagcatttctcacgctttgtgttttggagcctcccaggttgtgatgtttcgtgggctgaataagcttccagaagcgccggggtccctgttgaatgtgatacaatgtggcccaatatggacacgccaccgcccaccccaccttagctccacagtgaagacaaaagaccccagactgtggacttagacaacagaaacgggccctctcttactgctgaggaccagaaatcagggatcatggtgtctgcaaggccggcccccctcggaggctgtgagggaaggagctacttccggcctccctcccgggcaggggaatggtctgcacatccacattccctttttataatatggacaccggtcagattggatcagggcccacccaatgtccctgtttaaccttagtcacctctttaaaggcctgagtttcaaaaactgtcatattcggaggtattggggtcaaggctccaagacagcttcttttaggggtcacaattcagccataacaggaggtgccccagatggcaagcaccttgaggtctgcgagaaagaccctcccagggtgggggcggcacaggtgttctgtatcacagcagccccgggaaggaccctcccagggtgggggcggcacaggtgttctgtatcacagcagccccgggaaggaccctcccagggtgggggcggcacaggtgttctgtatcacagcagccccgggaaggaccctcccagggcgggggcggcacaggtgttccgcatcatagcagccctgtttattcgccggtttatttctgacggggaaagcccttaagatgcagagaggctacagccacctgggttccccagaaggccttgggcagtaggggggagctgttgctccaggaattggtgtggggagtgaggcggtgccctgtggagcctcgggatggtggggaacagggctggtgagggcagtggggcaggggcagcgcagggttcagaaggaaggtggcacgtgggcacgttctcctggtaactggtctacatggctgccgactgcaactcctgttagccacaggctgacccagcagcggccggagcttggcggccgggggtgtttccggtgctgggggctcacgtggcccaggaggctgcttccagctcattcctgcacctcccaaactctgcacggagaggagctccttcctcacgccaaagggtgcagagagctgccgggtgtgaacttaaggaagaacaaggtcaggctccaggaccaaggtggagtccatcagggccacttggctgcaaatggcaggggacgtggctgacacagcgagcggggccagggcggggtgacctgggaccccagtgtctgactcggcctctgcgtctcagctccactctccaccgcgtggccccatctcagtaggccttgcccccgtcacagccctgacgccacaccgctgaagcggcagcttctccttccaacagttctaaaaagggcaggaattgagtccctgtgagcaagctgggcacagccccccacctttccgcagcggagctgtggctgggagacacagtgcctgggtgtgggcctggccagacgccaccctggatttgggaggctcttgagacaaggcaggcagagctttgagccacccccgtgatgggtgtgctggaatgttccctcctggatgtgctgtacccgtggagagacgtgagcttgctaaccagacattcttctcacaggacacaccagcccctcggataccacttggccactcccgctgaggccactcccactgcgtggctgaagcctcgaggtcaccaggcggaggcgcggagatgcccctgcatcagctgggggacaagccgctcaccttccccagccccaactcagccatggaaaacgggcttgaccacaccccacccagcaggagggcatccccgggcacacccctgagccccggctccctccgctccgctgcccatagccccctggacaccagcaagcagcccctctgccagctctgggccgagaagcatggcgcccgggggacccatgaggtgcggtacgtctcggccgggcagagcgtggcgtgcggctggtgggccttcgcaccgccgtgcctgcaggtcctcaacacgcccaagggcatcctgttcttcctgtgtgcggccgcattcctgcaggggatgactgtgaatggcttcatcaacacagtcatcacctccctggagcgccgctatgacctgcacagctaccagagcgggctcatcgccagctcctacgacattgccgcctgcctctgcctcaccttcgtcagctacttcgggggctcagggcacaagccgcgctggctgggctggggcgtgctgcttatgggcacggggtcgctggtgttcgcgctgccccacttcacggctggccgctatgaggtggagttggacgcgggtgtcaggacgtgccctgccaaccccggcgcggtgtgtgcggacagcacctcgggcctgtcccgctaccagctggtcttcatgctgggccagttcctgcatggcgtgggtgccacacccctctacacgctgggcgtcacctacctggatgagaacgtcaagtccagctgctcgcccgtctacattggtgagtggggctggcggggtaagtgctggcaggggtggctgagggcagtgttgcaggagtgagggtaactggccggagccagccccgccccctgccttcgtgtaccccttgtctgcatggccctggggctgctgcaagagttggcaggggaggagggtccgccctgaggcccaaagctgatgtaagggactccggctttctcatgtggaccctgctcagggctccaggccgctgtgcccgggagcctcagtgcaacccctgcgtggtgtccagcccaccttgccaggaccaaggggcacagtcactaggcgctgggtggcaccaggtccaatggcggcagacctcatgctccggctgggaacctggcacttgcctgggaaggagtttgatgtgggataagtgacgagggacagagccccaaggccacacccatgtttccctgaaagcaccatgttggctccatcagccacatagaggtggagggacagagccctgagaccacacccacgtctgcccgtaagcaccgtgtctgctccggcagccacataggggtgtggaaaagaccgagcaaatctggagagtcagaactttaaggggaaaaataacatgaagcagctcatggctgcttcacagctatctaagagtaaagatctatgttataactctatgctaggcagctgagctcactgccctggggcagccctgggcccctcactggcttcctgctcctgtttgttgagatgtagggaagccccatggcccgtccgacatggccgagttgacccagtgcacggcccgcctgaccccacttctcggcgtccccctgcctggcttggctctcccgggaagggcatcgtaggatggtcacggggagcagctggccccagccggactctgcagtgacctcagcctcctcatgtcctccttgagctctgctcatcccagtcacctggcagtgctcgtcccaagaacccaggcgggtgttgagatcacctcactccagcgaggggacgtcccaccacaccgagccttccaaatcccggcctgtgggagagtgagcgtggctgggcggaggggctcaggcctctctggtccctttccccaccctgggcccctaattcctgccagtgtccatctgtgcggctacttagacgccctgcaaacggggcttcgagggcctttgccctttcgtaagggaaagacagtgcacttggctttgagggggatttttaaagattgatgctgacccatatcaggcccagtggcaactgcacagactcatctaacttaaagaggcccatgaggggagtgggccggagatgcagaatggcgggtgcggggcttctcccaggcacggggccccacacggccctccgcagcccctgggtggtgcacagcggccctgacgcctctgcctctctcgcagccatcttctacacagcggccatcctgggcccagctgccggctacctgattggaggtgccctgctgaatatctacacggaaatgggccgacggtgagtggccgcgcacccagctgcctgcgctggagaggcccacgtgtctctggaagggggttcagagtcagcagggcccactctgagtcaggccgggcgcggcgcaggtgctgggcaccccccgggctggagggagtcaaggctggccttggctctggaggactcggaggatctgtaggggccttgggagtcggccccagggcaggaggcagggcaggcaggcagtgcccgaggcctaagcgcttgcaaagcccagcgagccctggccactagttccctaatgaaactgagatttttctgtttcttttcctttctttgtatcttgtgtgtgtgaccctagtttctgtaaatgtaagcaggagaaagcaaggaggggtggagggagaggcagagagagacagagggaaagacacgtagagacagaccaattcacagagacagatggagatagagatacagagggacagaaagaagacagcgacaggcagagagagacagagacagatggagatggggaggcagaggagacatgtccttgctgaccgccagtgctctgtgggtttgggccccccattcatcccttgcccatcctgcacttgtgaagtttccaaggtcctctgttactcggcctgggcaccgctgcaccttgggactctttctgcagatggcgcctctcctggaggtctctagcactctgacctcttacaaaagcccctctggcctcggattgataatgtggggtcaagtgtgtgcgttctgggcagagcctggaggtaggctggagctcgtgtcccgggtctggatgcttctctcagtctctgtgccccttctggctccgggatctgggcccactttgcacaaagtggggaggcagagcggggtctggcccccggaggcggccgcagcatttctgcgctggagcaagcaggtgccgcctggctgcagccttgcagggtgttggcgctccctgtgtcctctgtctgtctctgcggctctgctcccggcctttgctggccttttgccctcccgccgctgcctcactgtgaagacacatccccgaaagcccagagcttgtcctcactgtgaagacgcgtccctggatgcccagagcttggatgggcttctaccactccacggccgcctcagcccatggttattttccactcgccttttcgtttgaaagcacttatgtgcaaattgccacgtgcacaacagtcccttcgtggggagctctcagtgagctccagctgagccctctggcgtccctgggaaccccatctgtcatcctctgcactgtggggagggatgcctcctcccgctgttgcctggagaggctgctcctcttagtgcccaaccccaccgtggtctcaggaccaggccacaggtggcatctccagccctggagcgtgggccaaggcatggagccatctgtcttgggggacagctaagccaaggtggtgtttgctttagtctgcaaggaagggacaggacctgtggccagcagcaccaggggcctgtgttgaccagcgtgcagacagaccctggaggtctgcccggaggaggggccagcagcccccagtgtgtgtgccatggagggcacaggtgggctgcacgctgacccaggtgccactgcctcttccacaggacggagctgaccaccgagagcccactgtgggtcggcgcctggtgggtcggcttcctgggctctggggccgctgctttcttcaccgccgttcccatccttggttaccctcggcagctgccaggtgggtttcccttccccagcccagccttcacattgggagactgtcccttagtcttcgcgaagggggcaccccgtttcctctgctgtctttttccccgccatgatcaagtctgcggcacaccctcattctcagtgttcttcccatctgggtggagagacgcctcctggctgtggcacaaggcaggttgtgtgtccatcctgtcctgtggcctcccctctgccccagcggcttctccccctcaggccacggaacaggcttgtcccaatcagggcagggcctccatcccctccttcccccagccccactttgggccccagctctcccacacctccaaacccggcttgtgctgcattctcacgtggtttctgttccagtgccgcctccccggggctgcgagggctgcagggatgtcagacagtgacgttcccagaccggggaggggcagaggagtgggggcagagcctctctcggagaagtccacctccgggagcccccagcccccagccccagctcactctgtgcccttccaggctcccagcgctacgcggtcatgagagcggcggaaatgcaccagttgaaggacagcagccgtggggaggcgagcaacccggactttgggaaaaccatcagagacctgcctctgtaaggaccggagtcgggagggttcctagtgtcctcagaccctttaatggtccccatcttgggggagtcgttgagacccctccgggatcatgatggggacgcagcccctaacctctgtcgtgaccctgggccaagagattaaggagcaacagatagagcctctgggccaggggccgcagaccccgcctcagggctgcagagccgtgggagagtcccagagtggggccggggcctcggcccgcacccagggagccatcacttcactcatacagtgtggagactcctgtgggctgcgcctggctcccagtggccacggagcaaatcccttccacaccagcaagtctccccgtggcctgtgtgtcccggggtccccagggaagctgcatttgacttgagacccttccctcaccatgaccccccacactctaattccctttcatcaggtgtcacctgtgccgtaccccccgggccctgggatgctgcccccccatctccctccctccctcagagtctctgaggacctcccccctctacccggcgtgtcccgctcaccctctggggaggttgcttgctttgccgtctgccttggctgccttccctttctgctgagtgtggtccggccttgctttgctgtcttgctgcactgctagggtgaacccggggccctgagccggtggggtcctagagggacaacagaggggcccgggccctcccggcctctcctggggatcatgccttccctggggggctctccccagggctgggcacaggtggccctcagggtggccaccacccaagtcctcagcgtctgaggccccagcacggggagactcttgtgcccttgtagcagcaggtccctgagctcacaaatggctgtgtctcactggccatagtgggtggagggtgtgggcaatgggtgagtccctgctgcctgccctcaaccaggataggagggaaggcatcagggccaaaggtggcccctcagaaagccccaagctgtccacggcagagaggagcagggctggatgaagatgggaaagagaggcctcattaggaccctgatagaccccccaaaggagctgggagctgcctgctaaggagggtgaccccatgggccaagctgacccggggccacgttcccaggacttgggaacatcgtgtaggcactggctcaccctctctcctccacccagcagcagagcggcttagagctgagggtcaggcgccctgttcccagcgtggctgtgagcccccagtgtggacctaggaaccctggggctctttcagttcatcaggtgataaggaggtttatgtccagggttagttccctaaaccagttgctgggaagaaataaatcatgggacatgttccctttattaaagtcatgactaattctctgggcaaattcaacacgagaatttcagccgagcaatcagtgattaagaaatgaagtttgcatagcatttcagagagtcagggcctcctaacgcagccacacaccccggagcctgggcaggtctgggaaaagccccagggagggactcccccagggtgcccaccccagccccatccccccatatgccaggacccccccagggtgcccactccagccccgtcacaccacacgccagaacccccccagggtgcccaccccagccccatccccccacacgccgggaccccccccagggtgcccaccccaggtctgtcaccccacatgccagaactggctggggaagggagggcatgggctggggtctcctttgtcctccatcgtcttgcctttttcaagacgtgggacccaagtagttaaccagaaagaagaggcttttcaatcctcaagtcaggaaataaattttgaaagaactgggctctcccattttaatcagggaaggggacagaaagaacccatgttcatggctgctgaggtcagtctgagcgagccagcgaacacctccaagcaggcagagtgcctgtgaggctggagcggagtttctgacgccaacatcagctctgcaaggcacctgtgggcctgttggggctcagaggctaactagggctgcaccgtctgttcctgattcttcagaatccatttacatttggccacctcctcaaacaagagcatttgaatgttccaggcattcagagttgcgttcatcggaaccaggctctaggtgtggccgagaggaaagagccgccctcctgcaggtgggggtgatgtgaggccgacagtctgctctggtgagaggctggaaagtgtaggtttacaggatgtcactaagctgcagacgcaggggttcaagtcagcgacactgcggtgtgagcagaggcgacatggacatgtcatttattgtgaaaatttgcattactgtgggctgatgtgagaggctattgtgccatgacctggggcttcaggaacagtctctgcccctggtctatgttatgagttccagggacaggacaatagctgtgtctgcaaacacccccacctgaggccgagagccccccactcagtgggggagaagggtcacgcacaggagcgtgctgtgaacaggatgcaggcagctgtgagctgggatgaatgtgagctttgcccagtctgggtgatctgtgtaccccagagagagccgagcctctctttgcagaggcggtttcccttctgtctgcctcgatcactgcactggctgggagggctttgcgtggtttacaccatgcaacacgttttccatctcagcatcttatgcgcttaagcagcggttgggcgttagccctgctcaggcctccaatgctaacaaaaacagggagagcctccattcaccccccagggcctcgtgtgcagggacaggcagccccgacgcactgctgtcggccacctcctgggttagaaactgcaaggcctgatgtggggccttcccagcttccagggggctatgtccttatcctgagaccccacagccaggaccgcaacaggcagatgtggaggctgaggctgagccctcagggccagacggctcagagttcccacagttccccccagggctccaggcccatgcaccaaggactcgccccagttgaggcctcaccacccccagggccactggcccccaagtgcaaaccaagctagccaggtccgtctacccaggggcttcttgcatggagggttcgaatcccagtggcttcctgccccacttctcccaggggctggcggttggggactggccacagtccccattcccgtgattccattcccctatcccagggcctgtccggtcctggacttggtggcctctgcctgccccagccagttccctttttcaggccctgctgctggccagtgacggaacagggtcctgggtcacttggggtctctccccacctgagctgaagctctggccaaggcactgataaggtttttccctaatcagggactgcagctttcaggacaagtgggccacaggcataggctcagcctggcgccccctgggtttctctggaataagtgtgggtgtcccccacctgcctgcaccccactctactccctgtcggaacaggggccctttgtaatcagaccggggagctgacagcctcaggaacagcaggttcctcccaccctgggtctggcccactctgaccctcagtctcttctccacaccccgacctctgcccaccactctgaccctcagtctcttctccacaccccgacctctgcccaccactctgaccctcagtctcttctccacacccccacctctgcccagctccatctggctcctgctgaagaaccccacgttcatcctgctctgcctggccggggccaccgaggccactctcatcaccggcatgtccacgttcagccccaagttcttggagtcccagttcagcctgagtgcctcagaagctgccaccttgtttggtgagaaaactgaatcttgggggtcctctgcttttatgtcagttctcagaaacagagtcttcaagggcatcttctagaaagacccagacagggcacatggcagtgagtgccctcccacccccgctgccagagcaggtgtggagagcgccacgggggctgagcgactctgtccacaggccgggagagtggtggtcctgccctctttgtgggacatgctccgtaggtggaagggtccacggtgggctccaccccctagccacctagtcttggcttctgtgacttggtgcaggaagggtttggacctggctgttccatgagccaggcactggtgcctcaggacctcctggaacagtgcagctgggggtttctcggtgccagaggcaggctggccttcccaggctgggcaggtctgcagaaagtggggacccctcctcagagctgctcctcctgccagcgttcacagagtaccctgggccatggcagaggtgccaggcatgtgggccaccaccgccaatctaccgcgctctacccttccagggtccactatctggacaggaagagggcatcagatgagggctcccctccctcccccacaggcccatcctggcctggcccctctgggctgacctcacaagcccacattcccacactcaacagccccccagaggtcagctctactgccccttggagagcctccccacctgtccccccaaatctgtcccctccccacctgtccccccaaacctgtcccctctccacctgtcccctcacctgtgccctcctcacttgtcagcccagaagctagatgccagctaatcgcaattttttactgttggtggccactcaggcttcgacaaatgtccttgtcacagcctgcagggactcggcagaggcccctgggggaggagggggtgtggctgccctggaggggggtcagtggaggagtcattggcttcccactggggcaggggccgctgaccttggagcactctgggctctcctcctccccccgccccgccccgcccccccgctcccccttccccttccccttccccttccccttcccctctgaggcatccccgctgtgggctctggacagaggtccctcctagggctctatcagcgcaacagctaagcactcaggtgtggtgttgagtgctgccatgcaggcaggaattgatccctctatgcctcagtttccccacctgtaaagtggacccggctgatccaccaccctctcccaccacggccccctgcctgagtccctggctgaatccctccctctccccagggtacctggtggtgccagcgggtggtggcggcaccttcctgggcggcttctttgtgaacaagctcaggctccggggctccgcggtcatcaagttctgcctgttctgcaccgttgtcagcctgctgggcatcctcgtcttctcactgcactgccccagtgtgcccatggcgggcgtcacagccagctacggcgggaggtgagggccagatggcacctgggtacgcgtcggggccccaagcacccgcggtccctgggcatggaggaggagtggtgcagcacttgggagaggtggttttgaaaagggctacgtcacaggacagcggcaagggcaacacccgctcagcagggcacccggcagcatccacgtgaaaaggcaccatgccagcccccagcagtgcctgcgcttgggtcccggctgtgcccccgggcagtcatatgcctctctgggcctcagcactctgctctgtagctgtgtcaaatggaacaacagccctagtgttcggggtccttgaggctggtctctcggtgacataaaaagtgtcccaggatgtgctcctggagttgccatgtgctgggagtgggagggacacctgctggtcaggtggcaattagggaatatccaaaatacacgtaggtagcctgcacctcggccctgccctgcgggccccgggagtgcacctgcaggtgccgtgcaaggccgagaagcacaaagcagccgttgtggcattatcggaacctaagagtcatcagggtggacggggtcactacgctgtcctcacaacagaggccctgcccacaaaggagtggaggaagctcatcctgggccactgccaagacatactgtgaagtgggaaaaaggaaggagttggacaatgggcgcagtgtgctctgattcaagtgagaagtgcagatgtttgtgactgccgaggggcgtgtacgtgcagacgacccctgcaaatgcacagccggcctgtggctggagaaccgaggactggggtggggctggggccacgaggctgcctttgtgtacttggcgctttttctttcctaatgtttgtatttgatccatatgaatgtgttgcctgtccaaaaacaaatgaactagggaaaggggctgtgcatcaggcggacggtgctggggggcatgggtgtgccttccttgcgtgaggaggaaaaaccattctatcaccagaaggcagtgcccagtgtgagtgcccagcgtgctgggggcggtgcaagcttggcaagtttgtagacccgaaatgcaggctgcatggggacgagccccatggctgaccctgtgcctgctgggcgccagcatggctctggcctggaccctaccactcgcttgtcccccctctgcagcctcctgcccgaaggccacctgaacctaacggctccctgcaacgctgcctgcagctgccagccagaacactacagccctgtgtgcggctcggacggcctcatgtacttctcactgtgccacgcagggtgccctgcagccacggagacgaatgtggacggccagaaggtgagtggagccgctgcctaccgcccctgtcctcccctggaccctgggaaggggcccccgtgccttccccttgtaatcggagctattgttgggcttcccaggtgtaccgagactgtagctgtatccctcagaatctttcctctggttttggccatgccactgcagggaaatgcacttcaacttgtcagagaaagcccctccttctggttttcatattcgttgtaattttctttacattcctcagcagcattcctgcactaacggcaactctacggtaagctggggtcgggtgtgcgcttgtccagagctttccttgcagcaccctgaggcggagctctgcagatcctgagacaggagcactccaggaaacacccaggtctaagcgggcctgtctgtcactggtggcaggagagacctcactgtctctgatctctgacgaggggcttcccacttgggggggggtgatgatgtggctggggactggtccaggaggccactggcctagggggtgacttggcatgcaaccccacttctgtgggtgctgacgctgtggttttctattgcagatgtgtccgtgaccctcagagatcctttgccctgggaatccagtggattgtagttagaatactaggtactgtgcagtgtgaggaagccatggtcagttgcacagtgtgctcactgcacaagggcatgggcaagtgtctaaccaccaaggggatgtgcttcccagcaggaggctgttcccgcctgggaaggggtccattccctaactgtccactagaggggcccatcgtcatttatttgcccaaaggctttccctgggagatcatgggaaactcgcagccccaatgccgaatgcccaaagaaaggaacgtttaagccctctttgcaccccctgagaactccaacggccagtatcaccttcccagagcccatcattccaggcctcttggctgcctgccccctgcctagcccctacccaccaggagtgtgggtgctgagtgggcttctctccgcagggggcatcccggggcccatcgccttcggctgggtgatcgacaaggcctgtctgctgtggcaggaccagtgtggccagcagggctcctgcttggtgtaccagaattcggccatgagccgctacatactcatcatggggctcctgtacaaggtaagcaggcccagggaggggacagagggtctgctctgagggtggctgggggctccgaacatgccgcgatcttccagcagcttggaccacagcctagtacatcacagatgttcctgcagccagtttgtagaaggcccttcccacattcctcatgagttggttgtggggagaggcaggtgggctgcagggcctcctcctggggttcactgtccaggcccccagcagctccagcaaagcccaggcccaggccctgctccctctcccacctcctgggactgcccctccacagtgtggtcttgcacgtacccgggatgcccgttaactaaaagctttgcagaaataagaagtggctgctcctgttagagcggcttgactagctggtccactccgggcctcagtctggggggctggcgggcaggttgcagcctctccgtgatcagtgcgccttggattccattggatctcttagtctggccctcatttttcaagctaacagaaactttctgttgtgacttttggcgtatgctacctgggaggaaacgcagtatttgtgtttggaatttgcccccattagacgataaagcacaaagccttctaaataaaatgcggtcccacggccagctgttcagaggatcttgacgctcttccttgggtgacggacccaggagagttcatcctgcaggaacccgtggcctcaggctttccaggagggaggttagagaaagggaaggagcccagctggttcacctcccctcggattagcagaaaagaggcgagtctgagcagggccttgtgtggctctggagagaagcagtgggttaaggagacatacacctcggtttccccctcatctgaggtttcactttccacagtttcagttaccagaggtccaccacagtctgaatgtattaaataggaaattccagaagcaaacagttcataacctttaaagcacgcgccgttctgcacagtctggtgagatcttgatctgtcctgcccaggactcggattctccctttgtccaactttggaagaaggcaaggtcagaacttattctgcagggagctttggggatattggatactaaggcccaagccctctgtgatacgcctttcgctttggcataaaataacggttgactctctgttaggcgcgtctctgctcagggagtggtggtgtttggggaagcccaaaggcacatgagcatcaggaaattgaccatttgacttcataagacataacctttgtccagcgtgtccaggctattcatgccaccacctgttgatcacttagcagccggtgtggttcccacatcccccatcaccatatcacagtgccatgttcaagccactcttatttacctaatcatggccccaaagcaccggagcactcacgccgccgttcagctctgccaatgggaagccggaggcgcctccttcagcgagaaggtgtagttccttggctgggcttagtactacccttagactcacgcgtccacaggggtctcagtgtctgcggatgagggggctgctgtactttcccagggagccgtccccagactctctctttgctgtgttggatgcatcccttagctgggagcagcaggctgagagccctccacacgcagccatcccctgggctcagcacagccagcgggagccgtatccagagggtcagagttggcctcagcagcgcatgcgtccatgttaattgtagcgggggagcacacggtgtctccttataaacaccctcgcattccactttgtcctgcaccgagtcaaaacagcctcactccctgaatgcaggctcagggccatcagccaggctgacactccaggaggcacagtgggtgtttctggtccacgcccagcgtggaaatcatagtggtgcacatgtactctgcgtgggcattgcggcagcatccgtgcttggacctcaccgcctttggggcccacgtgggattcctgccacatcgtcctcttgccctgcaaagtcggtgcagcccctcattgttgacaaagaaaccaagaccctgaaggttcagaactgcccatgatggtggcaccggggcttgaaccccggctgtggtggtgaccggcgactggctctgtgtgaggttcctgtggccgccacgacaaaggaccgcaagcggggtggcctgatgtagcagaaccagattcgcttgcaggtgggggcagggcgggctccttccgccgctctggctctctgcagctgcatgtggcctttccctctgtccctgcctcaagtcttcctctcctttctctcatgaggacaccagtcattggatttggggcccaccttagatccaggatggtctcatctcaaatccttaattacatctgcaaagaccctatttccaaaaaaggtcccattcactggtgtctggcactgttcaacccatgacaagcccctcagtcctgtgcctctgtttttagtcaaagggtgtgtttcattccctctttaacaatattggcgtctgctctacaaaccggttatatgggaaagataccctctcagagcaggatgggtttccgtggacctggtgagggtgctgcaggctggggcagggacaggactgggacaggcccaccagtatccaaaggctctggccgagctccccacgaggtccagcgggctcctctctccccaggtgctgggcgtcctcttctttgccatagcctgcttcttatacaagcccctgtcggagtcttcagatggcctggaaacttgtctgcccagccagtcctcagcccctgacagtgccacagatagccagctccagagcagcgtctgaccaccgcccgcgcccacccggccacggcgggcactcagcatttcctgatgacagaacagtgccgttgggtgatgcaatcacacgggaacttctatttgacctgcaaccttctacttaacctgtggtttaaagtcggctgtgacctcctgtccccagagctgtacggccctgcagtgggtgggaggaacttgcataaatatatatttatggacacacagtttgcatcagaacgtgtttatagaatgtgttttatacccgatcgtgtgtggtgtgcgtgaggacaaactccgcaggggctgtgaatcccactgggagggcggtgggcctgcagcctgaggaaggcttgtgtgtcctcagttaaaactgtgcatatcgaaatatattttgttatttaagcctgcgtccccgtaccgcgtgctttatttctatgagtttgcagagtttggtggtctcgccatccttggcccacgtcctgtagtcagccctgtggaatccgtggatatgaaaagttggccttccttatccacaggctcccccgtaagtcggccttccttatccacaggctcccctgctgaggattcatcccaccttggatggaaaatgcagtttttgtgggagatggaactggagggtacggagggctgactgcacatacaaatatacatacatgagtgtacatatgttcttatataaacgtgtcacagtaaaattgttcctcatcttgcgttacatttccctcgttattcatggggtgaacagctggtatcaactgccttgcgtcccccagagccatatgttgaagccccggccccaggatggctgtgtttggaggcagggcctttaggagatgattatgtgcggggtcataagggtgggtgcaggtcccacaggactggtgtccttaagagacctctgccatccggagctccttatggccaaacccttcccactcgctgagccctgcagccccagggcctctctgaggacttagtttcaggtgggtcagatcagaacccccgggtggtccccagcactgaggatggacgccaccctcgccctccggtgctcacagtctgcagcgcctgccaggagttctcaaaacccaatgcgtcggtcaagatcccccccaaattagggtacaatccggtgctggtgacattttgatttgctaagtaaggagataaaacacagccataaggagaggggacctgggctcaccaggacgcttgtgtggagctcactgctgtgactgctgggccagggaggggcatggggggggcacagagggccaagttgggaaatgatggggagcagggggtgcagggagaaacttcccgagggaggtgacagaagggagtgcaggaacagaccctagagggagtacaggggctctggggagccagggaagtggatcgccactcagaagggagtggggaggacgaggaacctcaccaggtcccacctttgccatgttcatcaggagtccggttcatcaggagtcatcagaggtgggtggagctagggtcaggatgaggctcgggcatgctgggcagtgccggcttccagtgacctgcctcctccgggtgtcactgggacacacttccaacaagcaggacttagcacagggcagatgccacatccctgaccgggttattagagaccacgacactgcccagcccaccttctgaccaggttataagagaccacgacactgcccagcccaccttctcgccactcttctcaagggctgccctggcgggaaccccgcatggccaggaactggcctctgcctacggtcggcaagaaaccggatgctcagccctggccttcaaggactggaatcctgccaagggccacgtgagccaaccaagaggggacgacaccctgtagcacctggactgcagacacatcagagacccagctccgtggtgcctgaattctggacccacaaaggctttgacatagtcaacgtgtgctgcgaaaagtcactaaattctggggcagtttgttctgcagccatagctaaccaacacactgggcaacagcacaaaacaagggccagtcctttgccgctcacctgttctccatgggcatggacctcaccccccaggctcgtctatggcagtggctggcacttggccactgggctggggcaggagggaatcagggtggaaggtgccagccatctcctcctagagtcccacgagaccatttcggcggatgcctgccctcaagccctctgctcagagctacgtcccgtggtcccagtgagtggtgggcgaggcaggaaccagccgtgctcccagctgaaggaggtgttctggtaccggagtgtgggtgttggggcacagctggccgcacctgtcagaggcgtgtggcactgagcatccgtgtggaggtgtccatggggccctcggggagactcatgggagctgtcagcctgcgggctgagctgagattggtcaggggagctcatccgggaaggctgggcagatccaaatggaacccggggacctcaggactgagcaggtggaagaggctgcgtcctcacatcagggaaaggggggaagagcccagggacactgggtggagaagggatgagagggaggcggcacacgcggtctggccaccaagggtggtgcaccctctctgctgccagtggtcaagatggtctctgactcacagatgacgattccaagggtctgagcggccctgtgtgttccccgatgtctcacagtgacaaatgggcagaggcaggggctgtggactgacagcatcccccagttcgtaggtcgaagccccagcacccagtgtgatggtgttaagagctgggacctcagggaggtgactagggtgagatgagggggtgagggtggccccccgatgggattcgtagccctgtaacagaggaagagaccaagctcctctctcctctatgtgctgacacgactagaagacagccgtctgcagaccaaggaaaggaccctccctgggagcccagccttgctcgtgggcttcgggactccagaatgtgggtaaggcacgtccgttgtttgagccgccaagctatggttctgtgatggccgccgagctgacggaggctgtagagtttcgactccggtctgggggctccaaggactgtcccgctccatgccctgcccccaccctggatgccaggaaggaagagaaacgccccgagctgcagagaggacagagagagggaaggaagaggaccagcatgttcgcacagggcacacagtggaggctcccgcccaggatggagggcaggtattccagggagcggcccccaaagcgactgggtgtatgctgggctgctcatcggcattgcaaggcatccatctccctgccggcagtgagacttcgtggtgcgtgatggatgaggccaccaagcccagattcccttcccaggtccaggagggcccctccagtgggcagcccgggctgccggccacccacgcgggctctgccacccctcaggcagctcccaagagctgcggggtctctgcagctcttgagctctgctgccctcgcctcgatctaagctccccttgccttccccattgacaatccgcctggctctgactcaggcccagggaggagacaggagcagatggctgacagggacagttgggacacaggggcagagaggaagcagtctggttgcagcctggtcccggccccagccccccaggcctgatgacccagcctctgtgtgactcagtgcagggagcgtgtggctcctggccctgccacagaggccagaaggcatctgcagatgcccacacaggccccccgcttctccgggatcacgggcgcacccagcctggtgggcacatgggccctggatacgccctcggctgcatgctggcctgggtcctggatgcctcccacagccagcccctgtcctcccacgtcctgggaggagcccctgggattagccaggaaggtgccggccacagggcccggctgcctgtggggaggagaaagacatgcatcctgggagagggagaggcaggcaggagtcctccaagcccacttggttttccctcgagagattttccacggctgctgggatgagggctgcgggggcctcctgtgtgctgtgcactaaatgttcttcaagagtcagacgccaggagcagctggaaacgtcaaattttctggttgttggaccagttcctcttattcttctgtgcatttaaaaattatcactgaattcggccggctcgccagcgcacgcctataatcccagcactttgggaggctgaggcaagcagatcgcttgagcccaggagcttgagaccaaactgggcaacgtagcgaaaccctgtctctgtaaaaaaaaaatacaaaacattagccgggcatggtggcgtgcgcctgtagtcccagctacttgggaggctgaggtgggaggatcgcctaagcctgggaggtcaaggctgtcgtgagccatgaatgtgccactgcactctggcctgggtggcagagtgagactctttctcaaaataataataagaagaattcctacaacccaacaatgaaaggatgatccaatttaaaaatgggcaaaggatttgacttttatttcatcacaaaagacatagaaaaggccaacgagcccaggagaagatgctcaagattttcccactcagggaagtgcaaaccaaagccacagcgctgaccgtatcaaaaacaaaagcaacaaacaaacaaaaccagaaaacgacacgtcgtggagaacttggaatcctcacacactatgggtgggaatgtaaaacggtaaaatggcacagccgctttggaaaacagttttgcggttcatcaaaaagttaaccatggaattagcagatgacccagcaattccacacctagtatctacccaagagaaatgaagacatatgtccacataaagacatgcatacaaatgttcacggcaatgttgctcataacagtcaaaaagtgcaccagcccgaatgtcaactggctgatgagtaggtaaatcagcgtgggctgtccacacagtgggtcttgcttggccgtcaatcagaaagaatgaagccctgcgctatggtgtgcaggtgcgcatggaccttgaaacatgctcagtgaaagaagccagacacaaaaggccacgtgttttgtgattcttttgtaagaaatgtccagaatggacaaatctgtagagacagaaaatggactagtggtgccaggggctgggggaaggtgaggcgggagcgactgtcatgggtgcagggcgttttggtgcagtgatgaaatgttctggagttagataacggtgatggttgcacaactctgtgaacatgcttaaaaaaccgaattgtacactttaaagggtgaatatttggggatgtgacttatatctcagtaaagctattattaaatacatccatccatgcattcatcgctgactgcctgccctgtgctttcactcctgtagaccatggagatctgttgggggatctgtgtctgttccataactttctggtgtctgttccataactgcaactctgccaggagagcatgtgtgggccccatgttcagatgtaccacaatctccctccctgctcacttccttagggtggcaggaggcagaaagggggcttgagacctacactccaaccccactgagcagaggatggcaggaggcaggaagggggcgtagagacctgcactccaaccccactgaggcagatattttccaacaacggccacaatatgtcccatttcctctgctggaggtggggtctgtgcaccctctttttgagcctggcaggcgattgggagtgcctcgtggcagaggtgacacagcttctactggcagtgccttctgggaacgctcaacttgggaacccagcgccacgctgtgagcaagcccaggtcatgggagcccccgctctggcaccagctgtcagccaggccgagtccgccgtgatgggggtgccgtcttgggtgctccagtccccagctgggctctctgtccccacttccccttaggggagggaatcagcccttcccacctagccacacctgcagatttgggaaggaaagaagtaaggatgctgttttcagcctgagggcctctgctgtcagtaaaggcttgaaagaaagtgaggcaaaggttgatggaagctggaggaagggaaaacctcagaagacaggaacagtaggttatgcagcgctgtggcctgcagggacacagaggcagaaaacgtgcagatgccctgggcgagcggcgactccaggcagaaacgccagcaggctttattgcagctgtgcataagaaggagaagagagggttttgtttaacttcagttttcaagcaaaatttagataaaattaaagaagtcaggacttaacagaatttaaaagaaagctgttgacaatgccaagtgctgatgaggactctggtggctggaacactcacccgtcgccggtagacgtggagagcaatacggccgctcgggaacccagctcgacagtttactataaagttagacctgaaccttcttataacacagaaattccactcctagagaaaggcaaaattatgttcacacaaaatcttgtacacaaatgtttcttacagcgctattctttttttttttttttttgagaccgggtgttgctctgtcacccaggctagagtgcagtggtgcaatctcagctcactgcagcctcttactcccgggttcaagcgaattttcacaatcatcaacaaaattggaaaccacccaaatgtcctctaggaagtgaaaggataaatagtcgtacagccacacgatagactcagccgtgagaggggggcactgttaatatgcaacagggacgaacctgggaggcaccacgctgagcaaaagaaccagaccccagaggttagtagtgtgtggtttcacttacacaacagcttccaaaaggcaaagctgcagggatggagaggagacaagccgttgccaggggctggggtggagaggaaactgtggcttttaaaagtagcatggggctgggcaaggtggctcgcgcctataatgccagcactttgggaggccgaggcaggcagatcacttgaggtcaggagttcgagaccagcctggccaacatgatgaaaccccatctctactgaaaatacaaaaattagcatgcctgtaatcccagctactgcagaggctgaggcaggagaatcgcttgaagctgggaggcaaaggctgcagcaagccgaaatcacaccactgcactccagcctgggcgacagagcaagactctgtctcagacaaacaaacaacaaaaaagtagcatggcagagctgctctgggtcacgaagctatctgtgtcctgatggtggacgtggttctgggtcatgaagctatctgtgtcctgacggtggacgtggttccacaaatccatacatgtgtcaaaactcatcaaattccttttttttttttctgatacacattctccctcagccacccagcttggagtgcagtggtacaatcatggctgactgcagccttgacctcctggtctcaagtgatcctcccacctcagcctcccaggtagctggaagtacaggcacataaccaccacgcccagctaatttttgtattttttgtagatagggtgtcttgctatgttgcccaggctcgtttcgaactcctgagttcaagcgatcctcctgcattggcctcccaaagtgctgggattacagatgtgagccaccatgcctggtttatggaatcactttttacaagccagttttactgcacaatagcttaaaaaataaaatcaaaaacactgtttctcattccaagattctccaggtggtaaaggattcttaaattaatgaaaggacgtcaggcccaggccacagcagcagcagagagtctaaggagggagtcaaggatgtggctcaaaactcctctgttaaaacgtcagaaaagtttcaggtgattattcatagactctctcgaataaaggaaaggtctgcagtggatcttgagggtataccttaaagaccctctacacgaaacagagagtttctaagaatctttggggagttgttccagggctacccccaggaatcccccaggagaggagagctcgtcttgacaagatttctagatcgagatttgggctgatggggtgaacccaaggaagagccataggacccacagtgtttttataatgatcgagttcaacgttcgtagaaactgctgctgtatttgaaatttcatttcccagtgccctctgctggtgtatagagatgacggttgagtcccgtgtgctgaccctgtgtcatgaaacctgctaggcccacttttgtgcagatgccatgggatttctacataaacagccatgtcatctgtgaagagggagagttttaatttcttcttcctctccgacctatattcctttcatttctttttcttgccttattgcactggctggaacctccagtacaatgtcaaatgggaacggtgagagaaggcatcctttacctgttcctcgccttaggagaaaacagtccacctctcaatgcctctcaatgtgaagtgtgacgttagctgcatgtatttttttaatagaagccctttatctgttaaagaggttccccttctatttctagtttgctgatggtttttttttttttttaaccataaatgggtgttgagctttgatggccgtttctgagtctgttgacacaatcccacagtagatcttcagtgttgatgtggtagattgcgctggtcgctttcagaatgttaagcctgccccccaccccctgggatacacttgatcatgggctatgctttcaaatgttgctggattcaatttgctggtgttgagttaagggtttttgtgtctacgttcatgaaagatattggtctctagttttattttcttgtactgtctttatctggttctggtatatgggtaatgctggcttcataaaataacttgggaaatgtctcatcctctttgtgtttttccagacagggtctcactctgtcacctgggctggatcacggtggcatgaacacgcctcactgtaggctcaacctccccaggctcagggctcagctgatcctcccatttcagcatcctgagtagctgggactataggcacaagtcaccacgcccagataatttgtgtaaattttgttgcccaggctggtctgtaactcctgggctcaactgatcccttggcctcccaaagtgctgggattacaggcatgagccacccttcctggccttcttttctttaagttgaaataatgttagacttctatgcacctgtaagaaataaacaatacaaagagatcccttgcacactttgcccagtctcccccaatggtaacattctacaaaactgtactttgatatcacaaacagccagcccatcaaccttattctgattccgtggttctgcttatactcactcgtgtgcgtgtgtattaagccgtgtcacttgtgtgcgtgtttattaagccttgtgtacacactcgtgtgtgtgtattaagccgtgtgtacacactcgtgtgtgtgttaagctgtgtgtacacactcatgtgtgcgcgtgtttattaagccgtgtgtacacactcgtgtgtgtattaaaccgtgtgtacacactcgtgtgtgtgtgtgttaatccgtgtgatgttttatcttctgtgcaggttcttgtattgactgtgctcgaatatccatgtacgggctttgtgtgaacaagagcttatctctctgggtaaaatcaccaggttgtgtggtagttgcagtgcccccatccctttgtatatttgttagaagagattgcataaattgatgttacttagaattcaccagtgaagacatctaggcccggagatttctttttcagaaggtctcactgaaaaaaaaatccgtttctttaataaatacaggactattcactttatctgttgcttcttgggtgagtttggtagtttgcaaaaacttttcagctacaaggatgaactaattttatggaaaagggaggttgacccagaggatggaactgagagctcagacagcagggcggccctggagagccatcccctgagctaggactgagccctcagccgggccccgtaacttcactcacccagatttcaggaccgcatgcccgggagactgctgcgtgcctctccctccctgctctttgaaaggggagccgacggtgtggtctgtctgtcccactactggtgttagcttgtcaggggcagataactcttcagttcacagctcttcagatggagaagggggtgcacctgggagccgtacgcctgcagcaccttgtccacacctggacctggcttgcgggacaagactctgggcttgagtcagagtttgatgtcaccatggaaagagaccataggggagccagggcagaaggtgaatttattttgcatgagggagaattgtgaattgccggggccacagagtcgactatggcagatggcactttccccaaatgcccatgcatttggacacatgagtgtggagaccacagaggggacagatgagcgtggtgaccgctgaggggacagatgagcatggagaccacggaggggactgaggctctccactcagggggatagtgggacattccatgagtctgcagaaatctggggcacctgccaaagtccaggcatcatcccatcagatagcagcatgtgtgtgcatgtgaccatgtgaccacacacacacacacacacacacacacagttgtcatgcagtgtcccggtgaatgggggctcctagcccatcctgaagtgggggtcgaatcctggctgtgccacttccaagtcgtctgaacttgtgtggatcatgtcacccccgacttagtgtccccatctgtgaatggggcccatacagggacccccatcatagggcatggcgagggttaaccgctgcacctgtgcagagctctggggacacagctggacacagcatgaggacggccagcatcctcgccagtccagggccacacagtggtctctttctgtgctgagctggaggctcgaggccgcggatggaccctgaagctgcgcaggctgtgagggcgccctggtgcttcctctcagtgtcagctctttggggaacacaaaagatgaaccatagggagcgattactcagaaccataatttgcacttagattgattttaatcggcagcacattagaaaggcgcatgtgatcaccgtttaatgactgtgatgtgcgtaatccattttattctcagctggctcctgtggtaattacatttctcttgtgtttaattcataacttgatcatttattccaagtcgtgttgggcttggacctcgggctctcgggagcggccgtgacggagctcagacccagcacttctcctgcagagccagccgctcgctgctggccatgcctggaggtggcgaggacgggcttttccatcactctcggtgggggcacctgctccaggggcagctccatgggcgcttggcgggacggaagctgcgggaatagttgatgttgaggttgacggcgacagtgaggactgcaagaatacagtcacgtaccctggaacaatgttcaggccagtgatgaacctgtaataccacagggtcccgtacaatatgagacctattgttggtgcaccttttctaggttcaggtgtgtttagagacacaaatgctcactgttgcgttacagttgcctcttgtattcagcacggcaacacacagtgtgggtttgtagccttggagcaacgggcgacaccatgtggcctcggagtgtcgtgggcgacaccgtctgggtttgtgtgagtgcactctgcggtgttcgcaaccaaacaccgactttctcaaaactctctccatcagtaagtgatgcaacgctgcaccggatgcaagatcacgtgaccacacgctccccacacatgcaaagatctcacgtgaccacgcgcttcccacacacgctcacgcaacgatctcacgtgaccacgcgcttcccacacacgctcacgcaacgatctcacgtgaccacgcgcttcccacacacgctcacgcaacgatctcacgtgaccacgcgcttcccacacacgctcacgcaacgatctcacgtgaccacgcgcttcccacacacgctcacgcaacgatctcacgtgaccacgcgcttcccacacacgctcacgcaaagatctcacgtgaccacgcgcttcccacacacactcatcccccaacagcagtgggaggtccaggggcatgtggcagccccaggggtcctgggtgttctacttaacctttctgtgcctcagtttctcccctctgaaatggggctgataccacagtctcagtttcactggggtgatgagctggggtgcctggattataggaagtgcagtacatgtgtttgttaaatcactaaaaccatcagcacctttgcctgacaggtgaggaaaccgaggcacaaggagctgattggcccgtgatggcctcagagctcatcagccaacccccaccaggctacgctgcctcttctgggagcctccggtctccccagaacatctatccactggggttagatttgtccaatgcccccaccacaatcacaggggagactgcttgtcagcacagggccggccaccctggcaccagttcagtccctagggagggtctttccctggcatcccagggactgggctgtcatttaagtttaggccactgacacgagctcattcatccccccactccctccctcaagtttcctgagtgtgcaagcaaacccccccactgccctggacacactcattcccgccagggcgatcaggggtccccataactcatcagggcagcccccaccccagcaatccccacacctggaagtcgctcattaagacctcattagcccgtgctccacctcccaccccatggccgtggtgagtttagtctgcagcaacgacccgaccacaccagctgggcaacgagagctgcgagaatggcagcactgtctactctccactttccccagaaaggcccggccaaagcatgcacaggcagccacgccaggggctcctgcagcacctcagagagaccagtaatggggcggattagcaggggccaagggtctggggtgaggccacagtgcatggagtgcatggaggttggggcacgtgtgaccagccagggtcataaaacacacatggtcagagcagggcactcagctgccgaggaggggggtggtggggaggcacgggcaggccttgggtgcagtgaagcaggcgggcaggggagggtggcagcggggtgtgggggcaggaggaggggggtggtggggagtgggggctgggtcggggctgggccctggctgccctggctgccccccgacaccttccccagctggtcggtgcccaagggtgggttcgtggggcaactgcacccgctcccttccactctgctgtggcctgaccaagcgggctgttttcttgctttgtttgttgtttttttcttaaggaagaagagaatgaatttagaaggctgtaaaccccatctgagccttacacatagatctccttgaattggattttcaccaaggccgtgatggatgtggagtctcggctttctgacaacgtcttccagagcaggctttctctagagggtggactgcctgtgttctcctgggagagaatgcatttgcttccgatgcccagggcacgaaagaggtggacgaaacaacggaagtggagggggtggattctctacctgggaaacccagcatggcacactcatatagaattaagatcttataataagtgtgcagatgcgcccgttctaaggaaataaagggttctgccctcctaagaattctgcccttgcaaggggtgtgaaacctgcagagctgcttcccggcttcttcctccaggaagccctccgtcctcctccaagctgtagacacagggctggtaaacaggtagccaggcgcccccacagcctcggtgtggatccatggctgagcaagtcctccctggccactcccatctctgatgacagaacataccatgatgagagccgctgaattagcaagacagtgtggggaaggtaccctccggggactggggggcttctggactccgagagcccctgcgtccattcctgtttatcgcggccacttcccatctgggcagggcaatctctgtacctggggagtgcagccgcccatggagacggctcagaataatgagctgagtgtctccgtgtagctcccgccccagtgcggagctcctggtacaggatggcaggtggtgtctaaatagctattcataaggacattatctccaagcaccgggtggaaacgagccttcctccccccagctgagaagtgacaggcacttccctgtttactgaggacaacagtcaaccgcagagcggcgtggagctcgcagttcttctcatgtcacagttgtgactgagtgtcatgtcctaaagcttcaggatgaatgcaactccgctccaccaagggccggggacagagtgagaagacactggcgccaggagcggggaagaggggaggggccggcagctgcctaaagagcaggccctcctgctgtttctgagcccccgagggccctctgaccccagacaccttccctgccagctgaacaccattccagagtcagatcttggttttgttttctttcttttaaaaatattttattataaggtgaaaagaaaaggagagtacactaagtcttagccatggttggccctttagtctgaattagtatatcagctattttaccaagggcaggtttggacggtgcagagacaggaagagagtatcagagtgcccagcaccacagagaaggggtggctggccagggcgcccattgcaggcagatgaaaagggtgcccccgaacaggcacgatgggtagggcacccccaaacaggagcaatgggaagggcacccccaaacaggagcaatgggaaaggcacccccaaacaggagcaatgggaaagggcacccccaaacaggcacaatgggaacggcacccccaaacaggcacgatgggaagggcacccccaaacaggcacaatgggaagggcacccccaaacaggagcaatgggaaagggcacccccaaacaggcacgatgggaagggcacccccaaacaggagcaatgggaaagggcacccccaaacaggcacgatgggtggggcacccccaaacaggagcgatggaaagggcgcccccaaacaggagcgatggaaagggcacccccaaacaggagcgggggcctctgaaggcaagtggcagcagcttcctaatcctggccccacgttgttccaaaggtccatgaagttgaccaaacgccacacagccacgggagacacagtggccaccctggggcgtctacactgaaggccaagggcatgtggaggaagagccatctgagccgaggcccggggaggagccagcaggccaaggaggcggaagaaaccacgcagtggcgtccagggcagggcaggtgcgtcatccgggcgggatgcagagacacgtccttccaccaaccatctgaggagcacttggcacccacacaatgagcccggcaagggccacgccaggaggcagcgcacggggcagagcctctgagccagagagggggaggtcccttgggaggcccctgccatcccccgctctgggtgggcctctccagccagactctgcgccccaagggcagggctgggcctaagccacacctcggggtgcacgggctgtggggggccgctcctggacacggaaggacgacaccggcttccctgtacctctgctggggccgcgggtcccatgtcgtcagcgtggccactaggctgccagcctagcacagcctccagggcagccatggcccaacctgccttccgagcctcaggggtatccctgagcacatgggagtgcaggaaaaggtaccccaggggatccccactcacctcccggccatgtcctaccaggcactagtgccgcgctgcagccacccccgggccttacccacccccaccagcttcattgccttccaggtcccagcaccaccagtttcattgctttccaggtcccagcaccaccagcttcattgctttccaggtcccagcaccaccaacttcattgccttccaggctctcagcagcataagagacctacacacacacacacgtgcacacatacatagaaggggctgactcacacgccaccccatatgcaagccgcagaagctgggcgtccactgagcagcagagatagcccatcccagagggcaaggaggatccctggggtccctacgagaacacctcgcccaggtcctgcccgcggccccccacgaggcctctttgggagggaggctgccccctacaccactcagtgctaggacttacccatgcaccccccagccctgtgcaaccctgcccgtgcaccaatgaccccactcacccctgaccctgctcaccccaaccccgctcacctgtagccccaccaggttcttaagcaaaagctcagtctgtgtgcacacagcaaacacaattctgcctatattttctcggggtttggggctcacattggacactggaggctctcttgagtgagtaagagcagcagctcaggcttttgaaggcaaaatggaatggacgcagggcccaggagacaccaactgggtgagagcagggctccagagccagcagatggctggggtgggggatgcatgccccctgccacccactccagcaaacccggtcccctgacttgggttgtgtccagcaatggctttctgggcttgaaggcagagctgccaggaggaaggagtccctctgcaatgtcagaagcaccaaacacaggggagacctaactttcagggcctgggggaagctggggtggccaggctggtgggaaggagacattaacattttccgagaagccctttaattcttcccaataaaccgaacgagtacaagcctcagcatggaagcacagctttctagaagctggaaaatcaggctcatcacaaaagctcgagcacagttaatttcctctgacatttcctcctgtggttagtcttggagccagcaggtggccggaggcgccccattctttcccataaatggacggtctctaaggaatcaagtcaggccctcatctccaaaccctcatcccatttttccctggcctgcacgtggccagctgtgccccgcgcctcgtaggcctgtccctggctgtgccccgcgcctcataggcttgtccctggctgtgccccgtgcctcgcaggcctgtccctggccggctgtgtcccgttcctcgcaggcctgtccccggctgtgccccgtgcctcgcaggcctgtccccggctgtgccccgtgcctcgcaggcctgtctcttgggcagagtggctccctctctccatcagtccttcctccatcacaccggtgctcgtgcagaagccagggctcgcagacatcaccctaggcactgaggataccagctgcccgaacggacagacggacagatgctcagcctcctcaggtgctggcccatggcctcccaggctggatgagcagcaggtccctacgggggacgtggcagaggggaccccagccccagcagggcccagcgagccgggtgcccagcacagcactcacctgagcagctgtctccaccccgcattgagcccctcctggggaccgcccctttccaaagacgccctggtcatcttagacccccagaccctccggaaggcgaccgccatgccttaataacttgcgggggctcaggcagagctgtagggatcctgccaagctgcccgattccttgtgttcctggcagggggatccacatcatcctcaccccactccatgtgtgggacggggcacccaggaatgtctggggccgaggaagggggtggacctgagggaacccctacctgcagaaataatcatgaaaggggtggagcagatgcgggggacccgcgtccccaccctcacccccaggggctgagtcgacgcctgcagccagcgcctgcactcctgttcacatgggcttccctggcctctgtgcctgctttgcgcctgcgcggcaggtgaacgaccccagcccccttgcctggtgagtgggcctgtctgccgtggattccccagctgcatggtgcctcgggtgcccgcgatggtcctggccccctccctcgcatcggccacctctctgctccagcggtgcttcctgtgtgtcctcccagtaaacctcctgcccctgaccccagtctcccctctgtctcaggggcccacagggagacagacaacctctgggtgtccgacgtctcatcaagtcctttgatactccaggggagtggggttgacagttttccatgggaggacggagctcaacagagggtgtcacctgcacaaggtcaccataggctctgaccctgcagccaaggaaggctctgcaggagccccgggaatcccagccacagaacaggagggagctgcatgctctcactccacgcccgccctccaccgagccgcaggccagagccctggctgtgctattactcactattatctcagatttaccattcattttaccaggagagaaactgcaaaaggaaattaacatttccatactctgcagcgagatactttcatggacgcattctgagatttattctttaataatggaaaggaaacaccctactggcttccaattcggggcctgacagttcatcctattccaggcagagaaccgcaattcaataaacgcgctttcatttgttttgttttattgactttgttgtgttaacttggttgtgggaaatgtcgaacatggtaaacggaatgaggttggatcatgaacccgccctcccgggcctgccgtcacagcttccactgtcagcccccacatctcacccacctgcccgcgcacagtcttccccaaattatagttctaatattatgtggcaaagtcaagaattccccagtgatccgttggccgattgacagtggagaggagtggtctcagggggctgccctcggcgcttctgttaaaggagaagctccccagctctgggatggcccctgggggtctccagtacaccccgccgggaatgacagagtccccaggacttcagcgcagcctctgcagaccccaggccggggaaggaaccgaatacagggctgttcaggagcattcagagtagaaaccagctggaccacagccccggaatgttttaaaagaagtaatactaaggtcctaggattacatttcctcaaacatgttttcttttttttttttttttttttttttgagacagagtctcactctgttgcccaggctggagtgcagtggcataatctgggctcactgcaatcgctgcctcccaggttcacgccattctcctacctcaacctcccaagcagctgggactacaggcgcccgccaccacgcccggctaatttttcgtatttttagtagagacagggtttcaccgtgttagtcaggatggtctcgatctcctgacctcatgatcccaccagctcggcctcctaaagtgctggattacaggcgtgagccacccgcctcggcccaaacatgttttctgaagtgactgggctgtgtagacaaatccgtctgtggcagcgacatgctgctgtgatgaagctcatcattagctgtcacaggaagcagcaaattatctccagtcggctcttctcagactgaagcatctcaggaactaatgtcgttattatcaagccttgcaatttccagagaagacaagaacctattcatgcacgacgctgttagaattttccaactggttacagaaaatgaaaccgtgggctggacccaccatttcctgccttcacttgcggagtaagaggctcaggagccactggcgagagacccccggggggcatctggagggccccgctggccacctgggttccagtgcccacgctcacgatgtctagctgcaggtgacaaaatccaagtcaaaccagcttgaggaaaggcagggcccagggcaggactcaggggctagagcaacacccccagacctctgtgcctcttccatccccagctctgcccacggccaccaggaacccacttggcaaccggtgagtggggccgcccttcccagcaagcccagcgaaagggctctgggttccacactggctgatgcccccatcccaagacccacccctggggcctcgggaatggggcctctggttgctggggggggggcagcccatcccccagaccatgagggatgggctctctgtgaccccgcagaaggtgcggggctggggcggggcccccgtgagtctgggaagctaaaccaccacaaggcccctcctatgcctgggtgccagctgcccactgcagagcagggctgcctgaccggctgtgacggccaacaaagaggcaccagattcccctccagaggacatgcttgtgaaacagaagtggcatttggaaaggattacagagccagactctgggatgtgagggctgctcaggatgtggacagcaagattcttcatttggcgatatccggcagcctcagcccttttcaaaagaaaaataaaataacaggccaacaggtcttctctcttagccatcaaacccattacatatgggcatatatttaatatatcatgtatgactcgtgtgtgtgtgtgtgtgtgtgtgtgtgtgtgtgtgtgtgtgtgtagaggaagagggagggagggaggccgggcaggcaggaacagggtgggtatcaacaggggcaatgcgtgtaacaggattcagagcaatgcaggcatgtggcatgcaccagactccagccccatgcccatgtgtgcgtgcacaggccgagcatgtgtcatttatgaacatgagagagaaggtgtgatttcggcaggtcctgtgggtttgcagggcgggtctgtattctaactgctcatttctaccagaacacgttttccttaatttaatgctccttttttccctccaatgatatttttaaaaaccagattgcagagccttgctggttgctaaaagagattccaaccagccggtgccctcctgtgccaacgtttttgggtccctgcagaagcgcatggccggaggcacaggaatcccgcaggccccgccccaggcttcccaggactgtgaccaaaagggggtccacactgtccctagtcctggaggagtcacccccaaggtaccctcagggacacccgtgagcaggggcgagagccactcgggctgacacctgctgcatgtggagcccctggagaaggtggtggcttcctccataccctgtggctggtgacagtgagaataagttcccgttgtcttaaaccacgcagtccaccaacagcagtcgcaggggaagccgctgctatgcccactctggccgaatgccagcctgtgctgcccgagacacccctcccatcggcctgaatatgtggaacatgtctgcgtctggcccccccttggccaagagtcccttaaaatctgtgggctcttctatctcctcatctcattgttccctgaaggactgggggtgtttctgccagtgaatgcctcctggcaggctccccaggagccaccgtctcagctccggttccccagaagcagcccctcgggtaagtgtccccaaggccgagatgaagtcccagggttaagtgccggatgcagccacgcctcagccaggcccccagggagcaaggtgcagctcagaagctgtcccacctccagggaccgggtggtcctgcagcacgctctgccccgggggtgcagcacctggctgatctccactgtgctctgggttgagcaaggcagctctcaggacagtccccgaaggtcctggctggagctaggctcaagatgtccctgccccagtccttgatcctgtaaagtgcaagtttgatcaaggtacagacctcaaggtgggaaggtctgagaagatatgggaaaaaaacaaattgttcttcctaccctcacagcactgaacacagcactcccaacccggagagtggtgattttttcccaacaccaagcagttctccagcagatgccagctggtgtccttcaattcaattctgacactgtccacctagagatggcgtcagaccccatagagtgagggctgagtcccacagggctgcccccacttccaaagtcaactgcaagcctcaggggcttctgtccacacagctataaaccaggtcccgtgagcccctccccaggctggagtgatttgctgcagcagcacccaggacgtagggacacaggctcaccggtttattatgaaggacattgcaggagacacagatgaccagcaggtggatacctgggggaggtccgggaggccccgggtgcaggagcctctgtccctctgcagtgggggccgccctcctggcaggcagacgtgtcctgcaaccccaaagctcatctgcactgagtccttcttgggactcatggaggcttcaacacacaggcatgatcgactacgtcattgaccatcggtgatcaactcaaccttcaacccctttttttttcccgaagatcagaggttggggcagaaccttctaatcatgtggttggttcctgtggccaccagcccccatcctgaagctgtgcaggagccccccagagccaccacatcagctcgaaaaatgctcctatcaccccagaaattccaagggattgagaagccctgggtggacgcagctattcctcgggaaatcgcaaaggctataggagttcattgttaggaactggggccaaagaccaagtatcagaacaaaagattctcctagcacccctattggtcaagaaactacaagggctatcgtcgctctatgtcagagaccatttaaatgcgtatttattcttatatcacaacatggcagaagctgatcctggatgatctgggtgggccaattcgatcacaagtcctccacagcagagaagcgcctctgcctggcatcagatgcagtggcgaagtgtggtgctggcaccaagcctcagggccgggagggacggggcattcccacagaaatcaacagtaggatccagccctgagcttctcaagcggggcgttattcacaccacgcccctgatgcgtccgtctgccgtctgcacctgcacctgcacctgcacctgctctgcgtcctgggtgagctccaggctgaggcaccttgggtgggctttctggctgtcctgcaggctcactctggatttgagcaggaacctgtgggcaacgtggaccgtgctctcttcctgctgtgaagctgcgggcattccagggcctccttgagcaacggcaaaatcagagaaataaggacatggcctctcaaggcgtttcctttgatagaaaatgtccgttttccatgctgaatttctggaagcttttggttaagctgcagattcactttcccagaggcacacatgtgcctatcaccttgtaagtccatcccacacacgtttaccagaccaccctattgcctcgttaatcttccctcgtccacctggcaaggcagccagcatggtcttcaccataccatattccaggcactgagacttggaggggccacgttccctacccaaggccctggtcagaagggccttgaatccctgggtcaaacccccacctctctgcaccagctgtgaggcggggacagcgtcctccagggcccccaggaggctccggatgggcagcatttactcccatcaaggcttgtccagagcgggagggccgcagtctatcctgcggctgggcgaggagagggtggcttgggaggtccgcattcggaaagcaattctaagggagatggccactctcagttgtcattgcattctctagacacacacacgcagcaacacacacacacacaaacggggccacgtgcagatgcagcaacgtctacgtggggcaacacaaagaggacaacaggaacacttgggaacacacaagtacacaaatgaggcaatgtgcaaatggagcaacacgcacacttataaatacggtaattcccaacatttggcaacatgtcgttgcagcaacgcacactggcctgtgcttacggcaggcctccacccgcctgtctgtcaaaagactacacattggaacatgtcatctaacaatgctgcagcatctcacccggcaatcgtttgaggggaagcgctggcttccagcgcctcttacatggatggtgcaggtgaggctgtagagtgcgcctgtgtagtggggctgtgcagtggggctgaggagtgcacccgtgcagtgtgcctgtggagtgaggctgtggagtgcactcatgcaatggggctgtggagtgcgcccaggcagtggggctgtgcagcgaggctgtggagtgcacccgtgcagtggggctgtgcagtggggctgtggagtgacatggttaggttttgtgtccccacccaaatcttatcttgaattacaatccccacaatccccatgtgccaagtgagagaccaggtggaggtgactggatcctgggggcggtcacccccatgctgttctcatgattttctcacaagatctggtggtttgataaggaactcttcccccttcattcagcacgtctccttgctgcggccttgtgaggcacgtcctcgcgtccattcgccttccgccacgattgtaaattacctgaggccccccagtcatgcggaaccgtgtctattaaaccacttttccttacccattatccagcctcaggcaggtgtttgtggcagtgtgaaaacagacgaatacatgcggtgaggctgtgcggtacagctgtagagtgaggatgtggagtgagtgcggagtgggtgtggggtgtggggtggggtgtggggtggggtgtggggtggggtgtggagtgggtgtggggtggggggtggggtggggggtggggtggggtgtgggtggggtgtggggtggggtgtggggtggggtgtggagtggggccgtggactgcagctgtgctatgcacagctatgcagtgaggcttctggaattggttgtggtgctcaagtttttaactggcctgcgtgtactttaatgtccaaacatgacctgccctttctggggtttgccttaagtgtcactgaggggaagagaaactgaccgatggtgcagcgaacggttctcctttccctgagaaagtcctggccacttctctcctcacgggaggcggcctctgagccctggcctgtcctgcctgataagacagtcctggttacctgtggaccttgggccaggctggatggtctgtgctattgatgggatttgtggtgggcattttgggccacatggtgtcagctgcacctctggagggatcagagaccaagctgccacacgtggtcgcttggcagagcccgtgggactgagccccagcaaagccctgaaccccaaggcaggccatcggctcggggagaagcaagtgctgtcaggccgcccagtggggagagcagcagcccatgcctggaccctcctggactctgccagttcccttcaccgattctagccggtgccccttcgctctaatgaacgtcaactgtgagcacagcaggtctgtggcactgcgtgagccttctggagaatcgcggagtctaagggtggtttggggacaccagagctgcagggggtaaggcagtgattgaaggaaaaatagaactcgtctgatttgttcccctagggattcaggctatttaatgagccaaatagtcataaaccatgtttggggactgtacagataatagtcttctagtgactggcaaagcctgctgcctgcagtgccgggtgtggaggcttttggtccctggtcctaccacaatgggctctttattccaatagcttctttcctcacccggcaaaggggctgggctgctgcgggatgaatgcctggccagtggtggggacatgtcttacaggcagcacagaacacacctgagaggataaaagctcatgtggtctcagcacctgccgatggagtcggggggtgagagagaataagaacacccgaaaaaatcagggagctggggacagggactggtgtctagaacaaggaggagcaatctctcattccctatctagaaagcacagtgggaggaggtgctcggggcccagcacctgtgtatgctatttttagaaaagttttacattcaattatccacgtcaagctcaacataattcattatctgaaaagaaaatgagcaacagttaagcatcccggcccgtggtctgggcttcttctcccagagaagtcctctgagaccaggctaagctggtgggggttgaaagagcaggttctgaagacttagaagtgcgggggttggggggtgattgagtggagagggagagctgggcccagccttcggggagcacggggtccaaccggcaaggcgctgggtacaacactgggtacagcgaagggctccttcctggtcccgcagcctgaggagaggcgcctggtgactttatatggggagggggagcagccacggaggggccccgaggggagaccccacactctgtccttcagaggcctgcccgagaggctgacctctctcctgggcttggctgctctgctctgtcgggccctggatcggatgcccgtgccctggtcttctgcccactggactcagtttcccctgacaggagagcagggtatcagggcctgccctccaggtatcctcatcccctaggaggtgaataaatgatggaggtgtcccctaaattcacagatgactatcccaggacatcggggcacatggcaaaaacccaagtcaaacagctcaagagaataaaggttccatgggactgaaagtccagggggcagcaggggctggccagggcctcaaatggtgtcctcaggaagtccaggggacagcagggctggccagggcctcaaatggtgtcctcaggaagcccagggggcagcagggctggccagggcctcaaatggtgtcctcaggaagtccaggggacagcaggtgctgtccagggcctcacatggtgtcctcaggaagtccagggggcagcaggggctggccagggcctcaaatggtgtcctcaggaacctgcaggctccatttgactccaggaatgggcccaggagggtgggggtcccaggagggcaggagtcccgggaaggcttggggtccagatccagagagggctctgtaatcaaatgcagcctgtggctcctccaaggtcctgcactggaatcgcagcccccccaggcaaagatgtgagaggtggggcctttgggaggggatttggtggtgaaggtggggccctcatgaatgggattagtgcccttacacaagagtccccaaggagctccctcacccctcccaccgcaggaggacgcggcaagaaagcgccctccgtgagccaggaagcaggccctccacagaccctgaaccttcccttgatcttggccttgcaactcccaggctgtgagaagggatttctgttgttcaggagctccgcccagcctctggtgttgtgtgtcagcaccccgagtggaccgggacaggctcccaagtggactgagacaggctcccgagtggaccgggacaggctcccgagtggactggagacaggctcccaagtggaccgggaaaggctcccgagtggaccgggacaggctcccgagtggaccgggacaggctccctctctcttgctgctgggatgtctccccgggagcttgcgtctctcgccaccctcacctcccagccagagggaagccaggaagccagggagatgcggcctgaccggcaagggtgccctctctccacacccccggccagaacttactctgtggcatgtctagctgcaggggaagtgggagatggagcccttagctgagacttggggtgaaagggagggaggatccacaggcggctgtggaccggccctggctgtgtccgtggctcacgggagcccagacttgctgtgtggactgggcttggggtccccaggctggccaggcccatgctggcacctctgtggaccctctgctctctctgaggatcatggagggagtgggccaccctcggtgagccgggcacctgccctcagcccctcttgcccccggagttccttgccccttggcatggcctcacgttgttaaagaaagcgtctcaaacgggcctttgcagctccaaggcaagaatgacaaaggaggaacggtttcaaggttttgcttctggaactcccaggaagcaactacaaaatggaagacatttttcctatttcaatatttctaagcagggaggactcctgactgcagataaaggcatacgctttggatctctggagacgcagaaatcatgtttatgcaaactccatccttagcccaaggaggaaagaagcctagaagacagggaagagatgcccgcgccacggcgcccagtcctacctttcccagagggcagcctggtggagccacgtggaaggaagggcgggcatgacaagaccctcagcttcctgctccaactccaaccctgcctcacgcgtctcctcatcccctccaggctcgggggccgggctgctgagccttcaagagaatgcaagagccacccgtcccttctctcgtgacaataaatgggagactaatattagccaaatgcaacccttttagctttacatcgcctggtatgctcacaagcacgcctggaaagttcatcacaaattggtgcattcataagagccataagcccgcagcttctgggtgagagcagacaaaatgctacttcttttttgcagatggaacagatgggctggcttggccctctgcattgcgtgtgttgcctgtatgttgtcttttcccaaaagcaaattgcaaaaagaaaatggctttctgctgggggcccagcaattaggaaccctccttccagcagaaggaggcagagaggagggtataggtggggccagggagggcaatgagaagaaaagggaatgggcttagggggctgggggctgctattcatcagtttcaaaccttctggtccagagaaatcggtgggaacatcacaggaaattctaagggacacgctctgtgtccatcggcctgaggtgcgtgtcatagcaagcccttcccaggaataatttctaggaaactgggctgcattgaaacatgtcttggaaatggatcttctttcctcagaagatgatctacctcattccctgtttcctccaaaacatcagctttctttgtgtgtctcttggctgatttctttaaagttgctgatgggtttcacgatccaaggtgactccaggccttctctgcttcacccttccacacagttctcctcagcaggcctggaaaggcgcacggcgagattgctgggtggacaggagtcaggcctgtgcttctgcgaggagtcaagtcagagctgtggcaacgagtgcccctccttcctctccccccaccaccccatgcctgctgtctcaggcagggtcccagagccaccagccctgacccgggacgcaggttgaatgagcagcatcttccaccagctccaggaataaaactccatgtcacaggcacagaggtccaggagggagccgcgtccctaaccccgctgtcttctggcctctggccacacactggcccaaccccctcctgcctgccacccttcctgctcacacaccacattccaggactcagtgaacatgtcctccttggacaagtcttcccaaactgccccacctctgccagttcccccagacatccagtgccctcctcgtgaacgtgcttgctgtagcagccctgcctgtcacctggcacggaggcacccagtgggctgggcaggtaggagtcccaagagccagcaaggcgccagcagggacgtcagggtgcagggcagggacgtcggggtgcagggcagggacgtcagggtgcagggcactacagtgcaggatgccagggtgcagggagccgggatgcagggcgccagtccttgcccctgttcacagtccagcaagctggggagggacgtggagcttcgtgggcaaggtttctccctaactgtgcctcccgctgctccacatggagagccgctctccgggcccggtctcctggacacccacctccaggtgcagagcagctgcagccacctggactgtggcctctgcatgctctgtcctcatcccgggctggcctgtcctaagaggccccgtctgtccttactccccgaagcacagcttgagacaccagagctggacaggaggggagtggtctccgagccgtgtggagccgggctctagtcctgagcgccttctgcttggagatgaaggccaggacgggtgcagccagggtgggcagagggagcctgggggaccctgggcccttcatgctgtcttggaggggagaggtctggtgccagggtgggcagagggagcctgggggaccctgggcccttcgtgctgtcttggaggggagaggtctggtgcacggcagggactgggccccagcagcctcttcccacctccccagcccacttcagccatccttcattcactcaccattcagccaggctctctggacacggccagtgtgggatgctcacagctggcctgctgtgaggacagcactgcggctccctgtgtgtccaatgtgccagaccctctcaggctgccatcactctggttctccttctgcctctctcttccacatttaaggaactttgtgactcctctgggcccaggacagcccagcacagcctccccatttcatggctgatgagctgccttaattgcctgccccctaatcccctttggcaggcaccccaacaaattcacaggttctggggagtctggcatgaacatccttggggtccttactctgcccaccatgtgggctgccccatctcatccacacccatgaatgtgaggcacaattaacatccccgtacttcagatgaggaaactgaagctcagggtcacctaaggtcgctcactttggaggtggcagagccaagatttgaagcccctgggtcggactgcagatcccgagccctctgcctggtcgggtggagcagagtctcattcacattgagaaaccaactgcaagcaggaggagacgttccccggagctgcagccaggagaccgctctgtgcgtctaagcagagagaacacaaagcatggcggggcaggcagaggacgccctcctccctccccgctgggcacagccttctttgccaggtgcatgccagccctggggagaggagacagagcctcttgcggggtctcagagcaaggacaggagatgagcctgggaaggcctgcttctgccaacgaggaccctctgagaccctgggtctgggagcccaacacgcatgcaggtatacacacatgtgcacacacacatgcatgcacacacaccatgtggacagcaggcggttcacaggaagacttgggggtgctgcacccagacgagggggaaggctgagtaggtgaattgccagctgttccctccaggtgctcacaattcgctcaacacacatctccctgtccactgggtaccaagcctgcgccagattcccgcagagccaggtggaaggcagatggctttggggggcacaaaaattaagggaacttggctgcttttgcccactaggtgtgagcccttgagtcaagggctcaccaggaggctctggcctccaggcagatggcagagatacacttgttgatatatgtttgacgactgcgtgagtcagaccatccggctgaatcagagcccggaggaaatacatgattgaaaaccaggcccattacagagcagccagctctccacggagccatgtcaggtttgaattagaagattcttggcttcttagccgtggaaggagaaggaaccctggataatttgggatttggagggagtggtgagacctggtcccagtgggggagacctgggctgggagggtcaacggagcaggagagagcctgggaagggagggaagctgcaagagcaaactcccacagcacacaaccagggtgaccctcagccccaactgcttgagactgagagggctccagctcccaggtctccggacttgctgttttaaaacctcgaaagtcccaggaaaaccagagtgagttgtttgtcctaccctgagcctcccagcctgccagtgccatcttacttaggcaacctgcagacaccatgtggaacagccatcccagctcacttgaggcccaaaactggattgccgagtgtctataacgctgacagggacctcacataactctggtggccaatcactctccatcctcagcctagcgcacaagacagccacggcaacgccccgagtgtgtcccactcaggcaaaggcagagtgtgtgacccccctccaggccatccttctcccacccagcctctccagctgccctgcagccaccagggtgagccctggcctctgtgtggaatgaagtgtgtgcacatcacaggaggctcacagcagcctggtgacctaggggccacgtcatgcttttcacacacaggaaactgggggtccaggcctggtgaagctggaattcgaaatcacctcctctccagcctgccaccccgacctgccctcggcatccctggccttcccggggcttatcccatgcagcagccgctgcacttgtgggcagccacgcctgcttcctcttctggttcttccctgagaacacagctcatgtttccagaaagctggccaaggtccaaggggcggcctgggaatgtgaaggacaaggatgccgatgactgaggcttgatcagcctgtagcacagcccccagaatctgccaacagccccagagatgcctggagcgcagccagcgtgaggctggaaagcggctccgccctccttgcccgcctgcgaacactcactgtgcgtacacatgtgcaggtgccgctctgtttttaaagatcctccttcgaacaccgtccgtcctggaacacgtgcaatttccatgctgtgggtgggaaaatctatagccaggctctaccgattatgtttattacgtatcttctgtgcctctaacacatccacgtttctgccccacccgccttcgtcctcataggaaaccaactactctgccactgacataataaatgcctgttgttttaagccactgagtgtgggggcatttcgttatgcagcaatagataactgattcaggtgttattgtcaacttaattttttcaattttaataagaagccttcctgctagcaagagtcacccaacagcggttgggggcctgagggaagagaaggttggaggctggagagatggtggctctcctacatttggaagcctgaagcctgctgcaaaccagtgacgggtttcgcacatcctgctggcatggcctcatcctgttcaccattgcatctgctccactagtgcaacacaaacccagtgagcgccaactgagcgttggagggactcagggtaagctagccaatgaaacaagcagggacccccacccgtgccgggcagtgttggagggactcagggtaagctagccaatgaaacaagcagggacccccacccttgggagcgtgcttccaaggacctcttgtgtggtgactctttggacgtgattgtcaccccaggcacagatgactaccttgcttggtaataaggacatgcctcgctcacaccactcaggaaatcacagaaagccaggctgtccccagcacactggctgccccagctcagcacgcctgctgcaccctagaatcacagccgtgcccgtggacctcggtcctcgctgcccatgggaccggccggctcctcaacaggcagcattgggagtgttgggatcggggcagcaggtccccaaggctctccaacttgcaggagacactcgcccccggagccctgccccccacaaggcgtgcccgacttcacgtgtcagtgaaggcatccggctggccaagggtgtggctgcatccccaatgggcatgaccggacctggcctgtcccttcccaagcacctcaccggcactttctttaaagagtctcagctgtttaggaagggcttctgtctgcagaaatcagaagagaaaggggcaaacaacgtggagttaagagcttccagccgctgagccatccggtttgtgagtgcacagaagagctcagaacggccgagcggcgtggctgccaggggtccccaccggaggcctgccatctgccttgtgtagaacaaggccttccaagtgacattttcctatgtggttttaagcaaatgctccaacacaatatttgcactatgttgccttttatgattttgtaagctcccaggccaactcacagataaatctttgaaaataagggcagcttagccaaaaggtcaggggtttaaaaaccaaacaatgagcttaggcagagggagagcacaatcgctgcatcctcctgctttggctggcagagggacagactccagtggccattgctgtggacttcctctttgtgggggtctcgacagaggcgcctgatggcccagcccgtggtcaggccccagtgttaccaagacagtggtgagcgcctggacctcacactgtccagcacctgtactccctggcatggtgtggatgctaaggtccccgcccaaacctctgtacttggccgggcgcagtggctcacgccagcaatcccagcactttgggaggccaaggcgggtggatcacgaagtcaggagatggagaccatcctggctaacatggtgaaatcctgtctctactaaaaatacaaaaaaattagcgcctgtagtcccagctattcgggaggctgaggcaggaaaatggcgagaacctgggaggcggagcttgcagtgagccaagatcgcgccactgccctcgagcctgggtgacagagcgagactccatctcaacaaataaaaaaaataaaaaaataaaaaaacctgtgtacttaactggtgaatcgtgtcttccagaggacaaatctggcctactccagcctattctagttggatggaacacctcacctcacacccgacagcccattcgacctcgttcattccccgtggagacccatcagtaacagccctgcccttcattcagccgctattcccattttacagacgactcaatcgaggcacagagacgctaagcacactcgcccaaatgtgaagtagcagggccaacattcaatcctatctactggcttccagcaaagggatcactggcgtttcctttgatgccaagatttctaagctctgatgtttgtgagctgcagccccctgacaagagtatcaggctccggttgaacagagaagtccaaagcagggcgagaacggacgaataatcacagagtcccgctgccagccaccggctcagaagccttgaattctcctagctgggcgggcccgggagggggttcctcagcctcccgcttccctcaacaccctgcgacccccgccccagcctgcccaggtttcctgctcccagcacagcaggtgcagccagccatgtgcacaaaggccaggctggttccctgggctgcactcgagcagctcctcccagccctgcacacatggggcagcagctctacccaacctctcccaggggttctggggaggagggagcaggggagggggcggggagggcccagagaagggacagtagtgccctgggggcccctgggcaacccagacatggaggggggggcaagcttgtgcctggccacctatgccagtgccaccaggtgctgggggggacacggaaaggacaggaatcttgccctcacctggctcccgagccaggggccggggcaccctgtgaggacactcagagggagggagtgtgcaaagcctgcagggcctgggaggatgcgtgctggggctgcctctcccaaatcctgctggggcgcaggctctcagggtggcttctgatgacaaatccaggcagtaataaggggcccagggcatcacatcccatagcgtcatgagaccagcccagggtgccagatgcagggccctgagtggggagggtgctgctctgggcacctgctttctgccctccctcattcacccctccccagactttgatgaaaccatctgtggctcccggcctctgcaggacccagcccctcagctcctcagcccctgcaggtgtccctcggtactgcctcacgccatcctgccccaggtgataactatgccctgagcccccaccatttccactgggcacatcccagaaatacgcattcacagaccaggcacgcccatgactgcggccagattttaaaaggaatcaccagaaatgtaatctccagtggtcctagagccccctgggcacccagcttctggcaccctgtggacacccaggagtgggggtcggcccaaccagctgcgcagccgcccagccctgccagcggggagcttcctccctccctgccctccggatacaccctcaccccaactgagcgagcccagggttgggggaggtgcatagttcccttcctagccggtgcgagaaattgcggagaacagggaagagggtggcaggaagggtctggtgcacgatacccgccgcgcccgctcggaatcctggttccctggagcgctcaccccagcccgccctgccccggggagcgcgagggggcgacccgccaggctgcacccgggcggggcggggatggcggcgggggctgcctccctcctccgccgccaccccccactgctgggcgcgccgcgcggccgccggctccgtggagacgcgcagagccgggagggcgcgggcgcggcgggaggtgtgcggggctggggtgcgcggagagcgcgagggaggagattctgagcgagggaggggagcgcgcccgggcagcagtgcgtgcgctcctcccggcgccacaagctcgccccgcgcagcccgagccgggctgggcgctgtcctcgggggcctggggaaccgcgcggtttggagatcggaggcacctggaacccgtggcaagcgccgagccgggagacagcccgaggaaccacgggttctggagctaggagccggaagctgggagtccggaggagagcggagcccggagcccggagcccggggcggcgcgtctgggtctggcgcttcccgactggacggcgcgcccgctggtcttcgccacgcgccctcccctgggctcccgttcatcggtccccgcctgagacgcgcccactcctgcccggacttccagccccggaggcgccggacagagccgcggactccagcgcccaccatgcgcctcaacagctccgcgccgggaaccccgggcacgccggccgccgaccccttccagcgggcgcaggccggactggaggaggcgctgctggccccgggcttcggcaacgcttcgggcaacgcgtcggagcgcgtcctggcggcacccagcagcgagctggacgtgaacaccgacatctactccaaggtgctggtgaccgccgtgtacctggcgctcttcgtggtgggcacggtgggcaacacggtgacggcgttcacgctggcgcggaagaagtcgctgcagagcctgcagagcacggtgcattaccacctgggcagcctggcgctgtccgacctgctcaccctgctgctggccatgcccgtggagctgtacaacttcatctgggtgcaccacccctgggccttcggcgacgccggctgccgcggctactacttcctgcgcgacgcctgcacctacgccacggccctcaacgtggccagcctgagtgtggagcgctacctggccatctgccaccccttcaaggccaagaccctcatgtcccgaagccgcaccaagaagttcatcagcgccatctggctcgcctcggccctgctggcggtgcctatgctgttcaccatgggcgagcagaaccgcagcgccgacggccagcacgccggcggcctggtgtgcacccccaccatccacactgccaccgtcaaggtcgtcatacaggtgagcctcagtaaccagccccggggctcccctctccttcaccccaaaagcagtgccagtggtgtgccttctgggtagggagtgggagagatgtcacagagacagtctactcctgcgaggctgggaaggcggttggggcagcttgggggcagctccagagttgccaggctcagcccctatcttcttccctcctgttgaggggatggagcccctgcctgtgacctctctggtgttggtggctgggcctcggacatctctgaattccttaagcctaatggaaacatgtgcgctggcacctgcgtctccaaaggaagagtaacactttcatcagcttctcaaaagactgtgccaccaacaggtgatgttccttcctctgcagagaagcccccagactggctctgccggtgcctcccagctgcctgccctgacccaaacttgggagtcagaacagaacctgatgccgtgttgggccagttcctagtttagcctcagctttcccatctgtgtgatggggtagtgatagcattgacctcagaaggtagagcattggagagaggacgcgtgggaagtgtttgcatggcccctgacacatagaagggctcacaggcactattattgcgggatggtggggacgatgtttctgcggggaaggttgtgaggatctgcgtgtggcggcggtgttgtggtgaggtgtgtaaaactggagccgagtgactaagggccctccaagggtctgagcaaagcgccgtgggaatgcgggtgggaagcccccttgggaatcagtttggctgaggttcgtggcacggggggttccagtgctggaggggagggctgatcaaaccaaagccccgagcaggaggctggtgtccagggaggaagtcagggccggtcgggaactttgaaaggcatcttggaaatgagcagccttagaagtgtggggtttcctccatttctggtgggctaaggaagccagagggtgaaggatccgggcagagtcgcctacctctgcccagctagaggggccagggtggctggctgtccccccaactccccacacaccagcatcgccagcctcccagctaagcttctgtagttgcctgggcaccccgcgtatgccagtatgcccggtgggggtgagggcagcagtgccgggcagggggtcacctgtctgtcactccctgggccctaactgaccctccactggccaccacccaggtgggctggggggtggaggagggtagaactgagctcccagtctccctggctgcacatagaactggtggctacaggtgtcccatctcggggaggcccctcccacagacactggtggcaggcagtgagtcagggctgctttgcttctgcggcgagagtccctcccctcaccagaggcagaagtaggcacggcctgtggggtaaacacagtgagaaatgacctctccctccctttgaggctttatctgctctccccaagctcctgtctttgattggcattggccagggggaacctctccccagtccgcgtggaggggccccaggggcgacagccactcagtccttcagaaggtgggcagtggaggggtcagcgctgtcactgcccacccaggagatgcccccactcagaccccggatccccccactcagacccccgatccccccgctcagatccccgatccccccgctcagaaccccgatccccctgctcccctggcaaaaggccaggagctcaccagcctcctgcagtcctcaaaaacaaacagccgaaaagcacaggggcgtgaggacagctcggctccgccccccggaaagtgtcctccccgcgtgcgtgggctctctgccaggtacttgggattgggcacctgggggacatcactttgcctcccaaagcaccacctgcccagccttgttgctcagaggctgcgaggcagatttggccaagtcacgctacggccggccacaggcactcgtccaatcgcagaggcctgtgacgtatcaaccgtaggacagcggccccacgccctgcagacgccatgctggccgagcgttgctgaaggcacccttggagaacgtagtttccatttttctttaaagggctcagctgcgtgcctgggagcagctgattacaagggtgctcctccatccgatgctgatgacctggggctttccagggccccgatgccagctgctctgtgtgcttgaaaagaacattcctcgtaggagaggccttggcttcccctgacccctgccccgccatttgccattttatgaaaggtttccccggaattagggggtttacggtccccacgtgggcttctgggccattggcagatctgggcaaacatccacggttttcagatggtgatgtctggctgaagaggggctggataccctgagctaagtgtctccctctcagtgaccatgtttggaagtgttggggcagtggccaatcaaatggcccctctttccaaaacaggggtcctttcctgccccagcgtctcctacgaaattttggcctgggcacttgcaaacagaaattgtgtttagaaatgaggtggttcagtgataacactttggagcaacttacaataatcctccctgaagccagctgggcattttcctagtgtgtagctgggactgggagttgatggtggagtgggcagggctctcaggtcagcagacaggacctggtgcccaggaccctcccaaaggccccagacctggccctggtgccagcagggtgactgggaggaggagctgggggctcagggacctacgggtgcccctgggttcccctggactgtcctacccatcctctaacccacccgcacacgtggccccacacgggcagatggcccttgcttcttggatggtcccccatggcccaggcccaacctccagctcagctttgacctcggctgtgacagggtcccagtggcacacgatctgtgtggcagggctcagggctgatggcccagatggtgggtcatcagagtcccatgcttatctgtcatctgtccatggcgtgtatactgaacgtgtgcacacatgtgtgtgtccaggggcccacagtggcaggggcctgggacttcaggtgtccgattcaaatcagatgaggtggctgcagcctttgaaacagttttagagacccgcccctgactatggccacacacgaaagcaaaccctcccagcctcacaggcacgagtccattagaccctcctgagcagccgtgaggactcctttcatcattgccattttctgcaccaagggagtcctgctcctgcaggctcagcctccctgcctcctccttgttttttctgaaagccttcttcatattgagtacaaacagcagtgctcttcgctgggttagaccccaactcagagggcacctgctccctcccaggggcagacaggggcctcaatttgtgcaggaggcgctggtgtcctacaacccctgctccagaggcgtccaggagcagacagatcacagggcgacttggcaaacaccccagccgttcagggctggcagaattccgggaaaggagaggcggctgagacagggaaggagacaggttccagtgaaatctggccatggattatttcagggctcctgtcccgtgccccaggctgtgcccagcaacctccacaggcagcatccttgttcttaggaaggatacagaggtgtttagagtgtggagtctgcaacttattctcaaatcattcagaaagaaaggtgtggccaaatggaaggagagcaagcagacagtgaatcaagggaggagactgcttgcgggtcatgcggcattgggctgcagccctgccacaggcagctgagtgtcctgggcattcttcctgcaactgttctgcagtaggaactttttcaagttagaaagttgcagaaggccgggcgtggtggctcacacctgtaatcccagcactttgggaggctgaggcaggcggatcacctgaggtcaggagttcaagcccagcctggccaacatggcgaaaacccatctctactaaaaatacaaaaattagctgggcgtcgtgaaggatgcctgtaatcccagctacttgggaggctgaggcaggagaatcgcttgagcttgggaggcggaggttgcagtgagccaagatcacaccactgcactccagcctgggtgacaactgtctcaaagaaaaaaaaagttgcagaagaagttcttcaaggggtccttaggaacagcctgctccactctgacctcccgtgaggacgggaaggggacccacgccacgcagctgtgggcagctctggctctggccgtagcggccacagtgtcctcacctgcagcgcagggcatagagggctgttggtgtggggccaagagtcacacacttcctccagtctgagcccatgaccctttagaggaaaggaatggagtatttttcctgccttttctattcaaacggtactttagaataacccaagagtagataaaaggcagtgtctcagcccagaaatgttcatcaataagtgaagaaggagcaggatggtcagaataccacccatcaggtgcaatcctcataaatcaatggatgtaggcatggattcttgacagctgctggggtcacgaaggggagagagttaggtgtgaggtgagccctggtgtgcacacagcctcgtggcatccttggagcaaagccattgaatctgaatctcatggagcccctgatccaacacacaggacacaccagggacagaggaacagggacaaatgtaccattaggatgcagccagcaaaacccagaccacaagaaacagctccaaataaacaactcgttctgttctacaaacagtgagggaatcggagacggtggcctggtttcttagcaaagactcggacaagtcaacctgtcgcagaaagccggcaccaaagctgatcattcttcctgccaagaaacagcaaaaaagcctaggtagtgaatagctacaaattcttgttgtccagagctgttgtgggtatggttttcaaaatggtcctgctctcttagaggtacatgcggaaatgtttacagacaaaatgatgcaatgtctcagatttactgaagcgtgatctgggggaaggggctgtgggagggctacagaggagacaagattggtcttaagtctgtaatcatggaaagtgagtgttgatgacatttttggcatgtttgaaaaatttagtaattaaaagttttcaaaaggttaaggtgctatatgttggaaataaagaatttggcgtatgaaatcaccgttcagatggtgactctgaggctgtggggggtgagagggcaggacagggaggtgaccttggccttgttccaggcaccagacctgcctgttggagccaggtgggagacggcagggtgaggacgtgcagacatgcgggtccacctctgtaccccgtaaccccgtttcccagatgaagcagagggcagagccacctgtgcacatcacgtggctggagagagacagggcctggaggtgctctcagaagggaaggcctagcctgaccctgtggtgctccccgtggggacaacggtcaggcttttgagtgagatgggcaagggtgggaacgtgaggggcccagagctggccatggctggctctgactgggcttggagtcctcgagagtgacttggcccagagtggttcaggctcacctgttcacagctctgcattgtgacccggggtcagctctcccgggctgtcctgcacttggactgacagcattctgaggatgttcaactccaaggacaaatggggtcctggggctgtgcctgcagttctgtgggtactgagggcagcaagggggtacagccaccctgtgcttgccaagaaccaccacaagccaccccacaggtgaggcaggcctcaggcagcagcccagggatctccaggtctgttctcaggggcactggggctcccagctggtaacatctgatgatgggcagagagggccctgggctgagcagggcccgagaggacgtccgacctgtgcacgaaccagaggctgccttcgtttttctcaatcaaatctcacgtggtgatctagtagtttgtattaagagaagaaagaagcttttctttatttttgattcatggtgaaacacacatcacttaaaatgtgctgttttaccatctggaagggcacagttgagcggcgtgaagcacgttcacattgctgtgcaaccgtcgccaccatccacctccagaaccttctctctccccagactgaaactctgtccccattaaaccctgacccccagcgcctggtaacctcttttctgctttctggctcggtgaggtggatgactcagactggcagaatctcaggcctcccctgggtcttctctaagatgcaggttcttgaaggcaggcttgctgctgaaagacgccagactccaaggccctgggtgattccaagcacttgaggttctggacaacgctgagccgttgggacaggaggaaggtcggaggaggggtggggtggccataggggcgctgggaactctggggtgacggaaatgttctgtatcttcgttgtggatcatagctcgtggtttcagcgcgttagtcccgcctccgtgagtctgtgttggttgtggttcaaagctcgtggggctgtagactgaggggtggatttcagcgcgtgttagtcctgcctccgtgagtctgtgaaaaacaacagcagcagagagtgaccgagctgccgtccgctcaaggctgtttcgggtggccaggtcctccctcctgtgggcctgtgtgcactcaagatcgtcctcccctggacggccatgaagggctgtgaagagcatgagcccccatcccggcagcccctcgctccctgaccaggctgctgcctgcacgaggctagctctgcaaggggggcacggaggggaatagagatcctggttcttggcgcttggtggggatggtgttactgaggtcacagccatggggtctgcctgtctcagagacccccactgttcccccgccatgccctggagtttgaccttgccatcgccagtgaaggcgcagtggccaaggggctgtccccgtccatgtgtcaccccaaggggaatgcacagctccggagggggaccaccgggctctgcagcgtcaatgaagaaactgaggcccagagcggggcaaggcgcctgccccaccctggtgcccactgctcttcccaaaagcattgccagtggggcaccacccaccccaggagggcaaggtgagagccctgggtctggagtgccacgtggacctggcacaggttggagaggggaggtgcccagcatgctgacccacccgaagccacccgtgcctactttgggattttacatccctgtgcacctgtgggggctgtgtcctacatacccagggctggctcctgaaggcagtcagggaagcaagaaggagatcaggagaatgcttcccgagaataggtggttttgggttgtccccagtggcttggaatggctggcttgccagaacccaggttcaaatcccagcttcaccactggccagcagcacgactctgggcaaatggtgtgaccatctgtgcctctgtttccccataagccaactggaggtagcgattgccctgcagtctcatgagttaatgacataaaacgctggagactgtgcctggggtggaagaaggactcaatcgcccatgagcatgatttgtgttctcccctggacaacggcagaaatgcagcagcgcttgggagggctgggagcctccccaggcaggaggaattctcttctgagcatctgggctaacatctttccttccttccttcattcactcatcattcattcactgaacacctaccacatgccaggatgggggtatagcagcccaaaaaaactggcaaaaagttctggccctttgaactcacgtcccatcagagaagacagaaaataagcgaaataaataggcaccatacatggccggcaaggagtaacgagagccgcagagaaaaccacacggggggagcgtgggggtgcaggcaggtcaggaaggcctcgtgcagaccctgcaggagcactccggtgggcgtcggggaagatgccaggtaggggaacagcaggtgcaaagaccccagggcaggcacgtgctgggggtgctggaggaacagcgctggcctggcggggtggccggagcggagggagcagagggccgtgtgagaagccacgggcagatcatgcctcgtagacctcgccacagcttttattctggaagaagtgagtgggcgtgggagattctgagcagagccgccacgtgacttacacgttaaagggacagttctgactgctttgtggagaatgcatttaggggtcagaatggttgggaagctgctgctggatgcctggggagtgaccaaggagtcctaggccagggtgggggtggagaaggtggcggagaggggttggataccagagacgtgcttttcgttgttcctacttcatttttcgactgacaggcaataagattcccttctgtgcttgttcgcacctatgagcttcgataaatgcagccatgtatccccacttcagaagacacaccggcccccgccctccagccctgtggcccacccgccccgatgcccgcccctccacccactggtccgctctcctcccccacagctttgccttttctgggacgtcgagtgaatggagccagctgggctgtggcctctcgagccggccttcttccttcactgcatcctctgagctgttgcctgcattgaccaggcgttcctttttattgtgcagtcagatccattctgtggatggaccacgttttgttgaggcatttgcccaccaaaagacttctgggttgtttctgggtttgggcgattatgaataaagtagctacaaatattcacatatgatgaattttgtgtgaatatacattttcatttctcatgagtaaatacgtaggtttcagattgctgggtcatacagaaagtgtatgtttgccagtgtttcctaagcgatgcgctgttttgaacgtccctcaccctagccttaacccacatgaagcagtggtcactctgcatcctggccagctcctggtcttgcctcactgctctggctatgacgtccagtatgatggtgaataggagtgatgagagtagacatccttgccttgcttccagtccctttttttttctttcaaaaaaaaaaaaaagtttttcgtttatttaagtttttgttagagctctttataaagttaggaaagtttccttatattcctagtgtgctgagagatttttttcttcatcgtgaatgaatgttaaattttgtgcagtgatttttctgtctcatcatgtggcaagatcatgtggattttctccattagtcagttaatgtggtgaattatattgattactttccagttgtgataaaatgtacatcacgtaaaatttaccactttaatcaatataagtgcacagttctgtggcactaagtacactgtcacatgaccatctccaccctccctctcggtacatcgtcatacgatcatccccaccctccctctcggtacatcgtcatgcgaccatctccaccctccctctccagagctcttttcatctttccaaactgaagctctgcgcctgttaaacactaactccccatctcctcctcccccagcccctggcaaccgccattctactttttgtctctgtgaatttgaccactccgggggccaaatataagtggaaaaccttggttaattcttgaatgatgaaccagcctcacattcctgggatagacctcatttcgtcgtgtattagctggttttgacttgctagtgttttgctgagaatttttgtgtctatgctcatgagaaatattggtctgtaagtttattttcctgggttatcttcatctggttttctggcctcataacatgagctgggaggttcttgttccttttgtgttttctgtcagaggttgtgtagaattggcatgatttcctctttaaagctttggtagattgtccagcaaaaccatccgggcctggagttttgtaggaaggtttttataaattcaattcttttcaaagaaaccaggtgtagtggttcaggcctgtaatcccagcaccgtgggaggccaaggagggtggatcacctgaggtcaggagtttgagaccagcctggccaacaggatgaaaccctgtctctactaaaaatacaaaacttagccaggtgtggtggtgggcacctgtagtcctggcaactcgggaggctaaggcaggagaatcgctttaactcgggaggtggaggttgcaatgaaccgagatcacgccactgcacaccagcctaggtgacagagcgagactccatctcacaagacaaattattttaaaagataaaggaatattcaggttatatatttctccttgagtaagtgttagtaatttgtatcttttgaggaattggtccatataatctattttgtcaaattttagagcatagatttatttgtggtattctgtcatcatccttttaatgtctgtggggtcagtaatagtgtctccttgttcatttctaatattggtaatctgtgacttctctcttttctccttgggcaatatggctaggattttattaacattattgttctttttcaagaatgagcttttgatttcattgattttttttctattgtcttttagctttcaattttatttatttatatttctttcttcatttcctttttctgcttgctttgggtttaatttgctcttcttttcctagatttcctaaggtgggagcttggattattgatttaagatctttattcttttctaacataaacatgaaatgctataaacatcctcctaattaatgctttagtggcatctcaaaatttttgaacattgtattctaatttagatcaaaatttttttatatcttgagattccctctttaacctttgtgttatttacaaatgtgttgtttagtttccaaatgtttgggattttccagatattacttttttatccatttctaatttaaccctattatgtttagagaacaaatgtgcatgatttaaattcctaattttgtgaatgcttgtttcatggtttaggataatggtctattctggtgaatgtcacatgcacacttgagcagaatgtgctgtgctatcattgctgggtatattattctatgaaggtcaatttgttggatagtgttatagtatttaattctagaatttttattggttcttttaatatagtttctttttgtcttttaagaactttcatttttccatttatttcaagagagttacctttacctcaaggagcatggttgtaatgcctgctttaaagtctttgtctggtaaatccatcctctgggtcatcttgagggtggcatatattgattctcttttccttgagagttagtcccatttccatggttctttttctgttaagtaattttgaattaattcctgaacattttgaattttgttgtggttctttgggttatgttagaatcctctggagaggcagcccgcttggtcagagctgccgcttttgtctcactgtctgtccgtggtggttccaatgcaggcctgtttttgggtcttttgctgttcagccattccacatgaaagtgccattcaggggcaggcttagatcttggagatcgtttatatcacagcggttttcaagcccttaactataattgtttaggtgtgttcctcatatgtggtaactccaggacttgtgttgactcatacacagaactgggggatccccttgttcagctctcacctctctgagatttcctgtcacactctctagtttccagggatcctttccttaggcctccagccaggaagcccgagtattccatgttatgtcctctgctgacttctttagatccacttctctgtatttgctcttggaatggttgccctggaatatcagtatgcctctgagtggactctgagtgctcagagtctgatcagattcatatcatgctgatttacacctgacacctcctgcttctcacttccaccttgatgtctgtttcaatggactcatttttttcttgtcaatgggtcacattttactttctttgcatatctagtaatttttaacctatactagaccttgtagatgacacattaaagagactggattgtgttgtgttcctttggagagggttgattcttattttagcaggcagttcagtggcagactcgtcatcttgaacttgggtcggcttggtttcatgcttagttgagtaaacaactacggaaagcccaaggcattttccaatatcccttctcacttggaagaactcagtgggcaccttcagcctcctctgtggattctgtcttagctggggtgggtttggaggccttgctctagggcttctccatcctcctgtgtcatgggcttcctggcatctctgttggctgcttcatgtgttaatgagacttcttccccctagctctgccaggatgccagccaccctctgataagcctttcgtggccttgttctgtacacgctgggccagcacagatcccacaggaaagccggtgtaggcttctgaggaccgtcaccatgcagtccccctctctagcacctggctctgcagatgtagccacagccacagcccgcatctctgatctctgcctccttggctcagatagtaacgttctgcccggacctcagctcttacgtctccatcaggaaactgtccccaaacagaggcatggtgatgatgggctcaccttgtgagtatccatgcccttagggaccacagtcctgaggtttgtccagggtctgaaaacaactgcctgatacatcgtgtacaattttatagttgtttatggcaggagagctagtccagtacccctggcgaaagtcatccgtagattttaaacactgcctactttcaaaaagatctgaggcagcttatgataaaaggcttgggctcaaaggaattattaaaacaatgttacaaaagaacacagaacaaagaaatagagttatccaagaaacatgagtctgaggacagccactgtgtttgagtaaatcttacactgaagcttatgaaaaagagcaacattatttggacttaaacatttttagcctgttgtctgtgaaaaggtgaacttactgtaaatttcagtaactctcctttgacatatttaaaggttaagagaattatttcaagagccttgttttcttataattcaaacacggttcctctccttaaaaactcacacttccaggctctcagcattcagagagtacgggagctgtttgggaatcattcctgcttgggcatcactcaattgtaactgctcacaacagccgtgggatgctgctgtctggggtgtcacttcccagttgattggcagaatcacgaagcccccggctcctgcgagtcagggagggaccgcaagtgtgtctgggccgtgtcactccggagctgcgaatagagccgtccggaatgtgctggtcaggagccagggcaaggaacgctcatttgtccacctgtcgacttcaggctgcgtgcccagcaggatgtgcacagtaggaagcggctgtcgggggtcactatttattgcctggagctgagggataagccattccatctgggctgaccccatggtggaggaccagatccaggatccctggtccagggctcaccagcatttcccatcaccactgccctgccctgcacccttaagacacagaagctgccagtggggacagaggtctttccagcccagggacctcctcagacacagcagcctgaagctcctctctctggcctgtccttagtacagggagcccccaagcacggggctttatttcctctgcacctgtgatgggctgagggagtcagggccgagccagcgaaacactggggttgctttgaagctggcttcaggtgaacacgctgaccccctgggtggtctccaggtggtcttcctgtggcagcaggtcaggcggaggcagcagcctctggggcaggaggcagagatgggaggggccatgggcaagaggtctggcagctctgtgtctgcccagtggcttcaaccagcttgtaggaggcagtggggagtggctgcccaaacggccccactgtccccacaggcctggcacagggttgagggtccaagattctgccccgctcagaagtttgctttgccaaagtggcccaaactctcaggggacccgagccatgacctcccaagtcctgggaggagccaaactgcacccagaccccagctcagagggcagcagctctcagcagagccctgggacagtggggcccctgcaaccccagaggcccagacggttagggacaaacactcagatgctagtgcagtgacctggaagcatgcttctaaccaaaggaagcatgcctggaacagggagggtccccaaggcccctaccctggcgaacctgccacagactagaagcgggtaattgcagggcactcagacaaggtgcagggcacccatcaaacttcctgcagtggattttcctgacagcttcttcaaaaggagcccatctaatgtattaaaaataactgcatttgtgtccgatcagcacagagatgctcagaaagcctccagttaaaaccagcggggtggagatctgtgttttgacagctccaaccccaaatacctttcatgcttctgcctgtcaggaagaaccacagaaaccccgagggtctcctgggcaggcactggtctcttggggctgcagaggctcaaaacacagaaatgtgtcctccgtggctctggaggcctgaaatcagggtcccaggcccacactccgcggaggctctagggaaggacccttcctgcctcctgcagctcctggaggctcttggcattccttggcttgtggccgaatcgctcctttctctgcttctgtctccacgtggcttccccctgtgcgtctctgtgtcatctaaggatactggtcattagatttagggcccactccgatccaggatgatctcatcgcacagtcctcagttacatctgcacactcttttcccaaataaggtcacacaggttccaatggacgtatcttttcggggctaccaattactccacaacaccacaattcaaggggagaggcagcaggcaccaggcctcctctcccggcagacaagtgctccccaaggcacaggatggggctccctggctcctggtggaaagcaagcaccagagccccagataagtgcaaggggaggaacaggaaggggctggaagggctaccccagcccccagccccagctcaattgcctagaacagtcccaagaccagcatcattctggcctccctgcaagggggaaggaagaggagcaggggtaggagtgacctttcacagccaccctggcctcatcctgtggggcctccagccaggtgaggccatgcgagacacagtgggaagcgggaggcgggaggcgagtgggctcggggcatttgccaccctctgccgctgcactgtcggccccgtctcccccccgctgccttccggtcccatcactgcccactcctcttgctccctgggggataaggtggaaagaggtcccctggattcaagccttagaatcctgcagccacccaaccggccaccccatctgtccacgcctcatctgctgtccctgagctcaatgtcttccagctgctggttggaggtgccagctggttcctgctgggtccgtctgacagtggcacagggaggttcaggtgggcacagacgccgccgcctcagctctgagtgttattggtatcaccccccaccttgaatcccagcaaaccaagaggagggaggaggacggagggagagggagaagaagggaggtggaagaagggggaggttggaggagtgagggggagggaggaggagggaggctagcagtgcccaggatcacccagcccaggaagagcgtggaaaggtggccggccctggcttgagggtggggggactctgggtggctctgccctgtaccctgaaatctctgtacaccaacctcatgggccaagagatctgctgccctgtccctgccctggggcttgaccagaatgtcgggggcagcatttggggtagaataaaatggacatgctcacctgcccttggggttcgcagcctccaccgggtcaccggcagctccattccagcccgaggggtgagcagcccttccgaaccggtctcaaccctttctgtggggctgccattgtcctgattctctccccaaaattgtcagctgggatcaccttgcagaaacccagttaaaacccaagcacaggactcggaggagacagatctcccaagaggctccagcctccaagagccggcagatcggcctgcgtctgtcaatggaactgctgcgactatttgtccataaataaaacctgttttcatttctcctgccctcaagaaactgctgctctccgagaccaggcccaggagtgtgggctgcttagaaaggaaacccaagaggcaccagcaggacctcgcttagcacggcatccccactgcctgcccaccggtccccaggagaatcagccatcccaggcatagcaggctttaggatgctgagattgcctgggcatgctggctggtgcctgtggcccctgcctgggaggctgaggcaggagaatcgcttgagcctgggaggtcaaggccgcaatgagtcgtgatggcactactgcactccagcctggacggcagagcaggaacctgtctcaaaaaaaaaaaaaaatggtgggaatggcttcacaactgtggagtgcttttctcattttactaggtgaggaggaacaggtccatgctccccgaggcacaggcacctaagacaagcctggccccggccgcgttagtggagaaggctacagatggccaagatgctcacaggacgggcacttcctgcccaggattccaatgtggccccatccacactgggatggttttgagaaccaggtgacggcaggtgcacctgtcctctgagccccatctggaaactgctttgtggacaaccgtggccttggatgaaaggggtccttgccagagcttgtggggtgcacagctggaggagaagggtttctgcatcacctgttttcattggttccaaggctcaaggccctcctggagtccccgagagaccgcctcatccgcctgggaagcgggttgcctgcataagccagggcaggacacaccagccccacacaggagcccgtgagggctccgcactgcccccaccctgagccgggctcctgcaggctccccggccccacagacctgtcaccacgtagatgcgctctctccggctcacagggcctgaggacagggtttcctctccaccctcagggagcagcaagggctgggtggaagtggggggtcccagcaagtcccagcccagagtgccaggaacaggtgagctggagtgaggagtgaacactgaaaacacacaggctgtcaccgcctggggccacgggttctgccccagagatagcgccagctggactgccggcgggtctggagccacctctgcaccttgcccggccgccgggctcagcaccggtctaaggagagtccgctgtggtacggccgctgggcagtggctctgagccctccgcctccagcatcgaggtgactgaggggatagcacagagagggtggctggacgtggatttcctggaggggaggcgggagtgcctgagccacaaacaggtttcatcacaaaacctgtgtctggcgtggtggcagggggacctgtgggctgaaagcagcagcccctggatcagcaaatggccccggcctcagaactgcacagcagcggccaccagggccacagccgagggccagagtgggagaagagcaagggcaggcgggtatgggtgccatggcaagggtggggccaagtgggcaaagggacagacctgtgttcccggcgctcccggcgtgggccgacccagcacctggggcctgcactcactcacctcctgtcacagcagatggtgctggggacccagcgaggcctcagggctgccccaggcccacggtgcctgcagggccaaggaagggccagtctaggcccggccccatcatctggctctttactccccctcctggggctccttatgaccacaaggacgagccttgtggatgaggggtgtggactggacagcagggagggcttcctggaggaggggctgagtcggctttgaagtcaggggaagggagtggtgcacaggtccccccgagtctcccagcatccgagccttgatcaacaggagggagatgggtaccttggggtcggtgctctctctttccctccccggctactcagctggaccccagggtcacctcctccatgaagccctgtttccccatccctgcggtcagtgtgtgcggcagccccaccctgaggagggggtggagctgggtgggtgcagacactactggtgatgaacagacagacgtccccgcaggaggggacggagcttccgtttccagcaccagcttcattcccggggatttttactgttcagtttctaaaaatggcagaagttcatttcttaacatccccttggcaaggctgcttccatttcggtgaaagtggaggccgtttgtggttttctctgcctgccggaggctgggccacggtgtctgcggaagacgctgtgtgcacagctgggctttctttgtgtgtgccagcattgctcaggaaggggaaggaaaaggaaactgagtcgcgaagggcaggccaacacccggaggccaagcaggtttcacggcagccacttctgccaaacgccagaggcacgtccaccaggtcacctggacagcccagccaggtgcccacccagtttctgtcacctgcacccagaaccggccctcagtggagtcctcgctccagacagaggggcttcaggacactgagaagggtcttggggtagattcttttctgaaggaagccggagatgctgagttggaaagggaccctaagactgtcccctgaccccacccagcccttccggcgacactcagaagaagctgctggcaagagccaagagatggatgtccagtcctcggtctgtgcacacctgaggggctcgtgccctgcagggagctaaacctgagactgaagctgtatccagacacacttactcacggcatgtcccaaatgcctgacacccacagatccacccaagtctgcttctctgctgtgcctgcagcccccaggagtggctatctgcatggtcaaagccactcctcccaacttgggggctccgggaggagggcagggtggggagagagtagctccctgggagccccagggtggcctgctcaacacaggctctgtggcttccagcccactggggagagatgagacaaagggagaatggaaagatctggaatttctttcgtgcatggagcgggggcagtcctcagaagcacagcctgagacagggattgtggtgcaggtgatggatggagggtgggccctcaggggaggagagggaaacacaggtgacacaggtgtagctcagagccttatagcctcaggaatctcccccaggggtgcttccagaatgcagaccccaaggctcaccccagaccaactggatcagaatctccagggcagagacctagaacttggggctaggggtttctaattttttttttttttttttttttgagatggagtctcgctctgtcacccaggctggagtgcagtggcacgatctcagctctccacctcccagattcaagtgattctcctgcctcagccttctgagtagctgggattacaggagcccgccacctccctcagctaatgttttatatttttggtagagacagggtttcaccatgttgtccaggctggtctcaaactcctgacctcaagtgatctgcctgcctcggcctcccaaagtgctgggatgacaggcctgagccaccatgcctggccatctaaattgttattaatagactttattttttagaacagttgtagagaagcgttgagcccacaggacagcggctccatggtgtctcctggccctcacctgttaataacaggtgtctccctgttattaacattttgcattagtgtggtacattgttacaattaatgagccaatattgatacattattaaggaaagtctgcagtttatattagggttcatcagtcttgtaccttctgtgggtttggacaaatgtgtaatgtcctatatctaccatcccaggatcctgcagaagagtttcattgcccgaaaaaatccttggagctccacctgtttattcctccctccccacaacccctggcacccactgatcctcttactgtctttccagtttgtcttacccagaacgtcacacagctgggattataccgtatgcagccttttcagaccagcttctttcccttcgcagtatgtagttgaggtttctccctgtcttttcatggcttgatagcttgttctttttacggctgaataatattccattatctggatgtcccccagcttgtttattcactcagctattgatggacatcttggtttttggcatttatgaagaaggctgctataaacatacatgtgcaggtttctgtgtggctttcacccctttgggagtagaaatgccaaggagggcgatcgttggaacacgtggtaaggatacgttgagctttgtaggaagttgccaaagtgccttccagcacggctgcgccattttgaattcccagcagccacgggtgagggcggttctgttgctccgcagccttgccagcgtttggtgtcgtcaggatcttggttttggtttttgtagccattctcatttgatctcattgttttaatcgacatttctctaatgacatatgatgtggagcatttttcttgtgcttatttttccattgctacgtcttctttgatgaggtgtctattcagatgttttgcccatttcttcatgtttgtttccttattgttgagttgtaaaagttctttatatattttggataacactcctttatcaagtattttgcaaatattttttcctaggctgtatcttgtcttctcattcgtttaacagtgtcatttttagagcgtttttgttttgttttgtttttgttttttcttttttgtttttgagacggagtttcgctcttgttgcccaggctggagtgtaatggcacaatctcggctcaccacaacctccgcctcccgggttcaagtgattctcctgcctcagcctcccgagtagctgggattacaggcgtgcaccaccatgcccagctaattttgtatttttagtagagatggggtttctccatgttggtcaggctggtcttgaactcctgacctcaggtgatccacccgccttggcctccaaaagtgctgggattacaagtgtgagccaccacgcccagccgtgtaatttcttaattttaatgaagtccagcttattcattttttttgtggattatgcttttgatgttgcatctaaaaactcattgccaaacccaagatacctagattttatacccaagatacctagattttattacctagaaattttattatcttgtattttatattaaataaaatgtgttattatctataaattgtattatcttgcattttatattaaggtctgtgaggccttttgagttaattatcctgaaaggtataagacccatttttttctacatgtggatgtcagttgttccagcaccatctgttgaaagacagtcttttcaacatcaataacttttgcttctttctcaaagatcatttgcccatgcatgtgtccgtccacttctgggctctcttttctgttccattggaatatttgtctgttctttagccacgattacactttactggctgggtgtggtggctcacgcctgtaatcccagcactttgggaggccgaggcgggtggatcacttgaggtcaggagttcgaggccagtctggccaatatagtgaaacccccatctctactaaaaatacaaaaattagccaggtatggtggcaggtgcctgaaatcccaagtactcaagaggctgaggcaggagaatcacttgaacccaggaggcagaggctgcagtgagccaagattgtgtcaccatactccagcctgggcgacagagtgagactccatttcaaaaaaaaaaaaaaaattacactgtaccgataactggggctttatagcaagtgttgaaatcggtagtgtccatcctgtgaactcacagtatgacgttaaataggagtgaggatagggggcctccctgcctccttccctatcttaggaagaaaagcttcaggtttgtcaccattgagtatgacatgggctgtaggtttttagtagatgttctctaccaagctgagggagttcccttgtattcctggcttgtgaaaggtttttctcacagatgggtgttgggttttggaaaatagttcctgttgccatgatggatttcgataatctgtttccgaaccctggagcagcctcgcatgcctggaataaatcctgtgctgtctaattcttaccatgtagcgctgcatgagattcgctgctatttgtgtaattcttagtatgtggtgctggttgggaaatcctgtggtgtataattcttagtatgtgatgctggatttgctgctgttttgttgagggtttttgcatctgtgttcatgagacatcctggtctgcgttttcctttcttgtaacatcctcggttttgttattggggtaatgccggcctcgtagagtgagttataaagtgttcctctgcttctatttcctggaagagactgtagagagtatctatcatctgttccttaaatgcaaggtagaattctaagtccgtgtccctgcgtggctccaggcacgctggttccccatctgaccctccgcttgcttttcctcgggctctccctgcctgggcctggaggaccacagcgggcacagggggcggctcaggctgagaaccaacggcgctgacgtcgcctaaagggggttcccagctggcagcctccaggtgctggaatgtttctcggtgagaagccgccacgggagtctgtggacttgtcacatcacccgcaggcgtggccctgaggccacgtatccaagcagcagtgccgtgcatattcatgtcggcattggacttgcaaattctgagtgaagtaaatgtcatcggcagtgtgtagacgttctttcggaagaagatctgtcagagaaaatgcaagctgattaccagcctaacagagaaatgtgcatcccggtccccgcagggccaccctggaggcacctctgcacctcccaggcacagctctgggaaggctgaaaattagcaccaattagggaagaatgaagctcttggttccctcctgaagcacttggttgaagcttgctgcgctcctttccgggagcaaatgagcatctctcgggacagttgtgtttcccttgggcagggagccactggcagctccccagtgggaatcgtgccttctagtccagatttccactttggaaagggaaggttctagaaagttctggaaagctcggctgtggctgactcctggcttagggctcaggcctgtctcacctagcaatgcagggtgagccatgtgggctggcttctggggatggggaggagagatacacacatggagaaaaagagggagatagagaagagagagggagagagaaaaggaaagagaggagagagggaaaggcagagagagaaacagagggagaaacacaaagagagggagagaaggagagagagacacagagagaaagggaggaacagaggagagagaggggaggagggggagggagacagcaccctcttctccctacccttgcctggggtctcagctgagagagggaaggctctgtgctggggaagaggcctccagcagggagtagtgactgatgaatgtatgattgctactttatctcaatagaggattcgaacagcccccaggcagggtcgcattttaaatgatggttttgggtgctgagccagcccagcttggagggggtttcgtttcacagatgaggagcctgaggctgggggaagccacttgctcagatgcacacggctggggccggcggcaggtttgcccgacctcgagtctgcgcttctcatcctggaagcgaccgccttgtcccctgcgcagcctccttctctggctcagccacgtgggttactactgagttcactcttcagccctggtgggggacgggcaagagatggggcgtgaggggcgggcggaggcagcgaggtctgggatgagagcttttctggagccttctctggagtgtgacccccttccccgcaaaaaaaaaaaaaaatcttggctcagctcttgggcttcggtgcagtaggggctttgtggccgatgcagaggaagccgagctctgctcctggaaggacgtggccccttgtcttacccaggcttcattttggggccatctttttaggtggttgaaaatgagtaactcattcttgaccttgtgcaatgcccacgccctgtgtccggggctgacctggaggctctgggttctctgctgagcagagctggggccaagaccacccctggggagcgaggagcaggcgctggtgtgcctggcccaggtggcttcccataaaagctgcaggcagccctgtctaatgtggcagccctgggccacacgtggccactgggcattgagacatggctggtctgagtgaagatgagcttcagcctgaaatccgcaccgggttttagagttaatgcggaaaggcggtatacaatagctcactaataccgttgcaagttgatatgatattttgaatacattaagttaaataagatatcgtattaaaattatcatagctgtttccttccacttttgtaacatagctactggtacatttaagcctcacgtggcctgcatcctatttccacgggactgtgctgcccgagcccctccctgctgatgagaagcagccctcgggtggctttggggtgtgtccagagcctgtacagcctccccttggggtggggtgccgcgtgcggggtgccaggcaccagccggtgctgaggccccatgtggaggcagccctgcatgatgggcagcaaccagtggggtgccatcgtgtgcggtgacgtgcacactaaagaaagacgctcagctccctcctctgccccgcctggccgccagctcagtgccaaaaccatggttagggggtgggaggccacgggtgcccttggggacctaccaggcctgcagggtccttggcagaggggcagtgcctggcaccaggaggacactgtgctggaaggtcagcctgttcccacagccagggatgtggggctcccaggtagccccattcatagttatttgaattgctgtgatggaggcaggcggaagaggtgggactgcgagggaaggcaggggccccccggggagagagtgggtgcctccttccctttcctcaaagcccaacggccttgcagtgagactgccactatacaacaaagagccagcaccgctgtgcacgctggagtctcacagatgagccgattatgtctttgtgacaaacacattattaggagtgagatgaattccttctgtgggcggggatgattcagagagaggcgtcccagccccaggaacagcctccccgcaaggtggcctcagcctcccccatgctcccctggaggccgctccctggcttggggggtgggtaacacgggagtccccccgacacggcgaggtgagctcacctcctgaggctggcgtgcagggaagtaggaaagggcacacactgcgaccggggaccagggacagggtcttccccgctgtgacctgtggggctgtgcagggggcgggagcagcccccatcccaaaaggaaatgggacaggagttgccaagaacagttccccttaccctccaattcctcacgggttcagcactttctctgagggggtctggtctgaatcccaaattcagattctgtattcaactgttcccttcattacaaagaacaaatttccgagcccagtaattcccgtttaaatttgtcaattttcatccctcgatagaaatcagtatgtggtgatcacaaaagccggggtattagcccagtggacagtttgttctgaaacttgtcccttcggggcagggcctgggttaggaggcctgagatctgcctggagcctggggtgcctcgggcaggggcatcgtggctggggattctctgcacttgccccatggagcagggcgggaagggaagccaggctcctttccctgtctgggtctggggctgctgcccttggcagctggggagaccctgggaccccagaggcagagccccactctctgtaccctcaggcgcaatgccctgaaagacaggcgccactttgtcttcagaaaggcaggaaccaaacccctctcacagttccagaagcttccctgagtcccagtttagacgcagaatctcctctgtggatcactccaactggggaaccaggagagggggtttgggagaggagggaagtggcttccacctgtgggtggggcaaagagagggctcccagctatgcagggcgggcccaaacctccagcagagcccctttcccagcgaggactccgaggactccgaggccctggcctgtggctcccagggaacaacctggaccctcagcataggacccgcaagctgagaccctcctctgttttactgcttcattttccatctgtgaccagggcccaggccacatgcacacacctggcgtaggagttacttcgtgatgtgtttggctgtgtccccacccaaaatctcatgggaattgtaatccccataatgccccgtgtcaagggcaggaccagggggaggtgactggatcgtgggggcggttcccccaggcagttcttgtgagagtgaatctcatgagatctgatggttttagaagcgtctggcgtttgccctgctgtcactcacaccgtcctgctgcccagtgaagaaagtgcctgcttctccctccaccatgattgtaggtctcctgaggctcccccagccctgcagaactgtgagtcaattcaacctctttcctttataaactacacagtctcggcagttctttagagcagtgcgaaaatggactcacacacttggcctgggcccagtctttcccggatggatggtgcgatgatcagccccgtgttcgtgaggacggggccaacccagacccacctggagttgtaaagtttcatcagcactcagccccacctgctcatgtacgtactgctatggctgtgttggccacagcggccacagtgagtggttctgctcaaaagttgagatcctccggcccacgaagccacagtgactcactctctggaccttcacagaaagcattcacccaccccaccctaggatgcgtgtccagaggtgaaatggctccctccgtgcagtcggagagccccttgactcacggctgcacccctgctcatcaggcacagcggcaggcacgtgacctctgtggggccacttgtcctacttgcagggaggggccgagcatgggatgcagcatccacgcctgcacttaaacgagccctctgtggccttgccccactcggcctgaggagagcctggagagagatgccgtccctgcctgggcgctgcgatcctccttccttcccacctgctctcgtccccacatctgcccatcgccaggtccagccccggatgcaggccacacctgggtccctccctggccccacccctgagagcaaacccagaatgcagttgtggctgcagcggcctcctgctttacctcctgctgctgcttcccacttctgagctgctccaagtccaggattgatgacctgacccctgcccccggtcctccccaccccccacacccctgcaccacctcacacactcttacctccttcctcctggcccacagatgcccttcagccctgcagcctctgcgtaaagctccctcctctggaaaatggccccttatctcccccagaccacgctgcatgccccctggtcctccgcaacagccgcatccctttccctgcagtgcccatctgcccacgtctgcccccctccccctcctctgcctatgccaggtgccttggatgcatcaggtgcaccgtcagggcttttgaaggctccacgaggcgggcctgggcacgcagtgcacgcagagggtgatggagggtgctagatggccggcctggatgaacccaggtgcacgcagagggtgacggagggtgctagatggccggcctggatgaacccagggacagggacagacaaggcaggtgcagccactgagttctggaacattccaagaagagtcaggcaaactactccctgctcaggtctgcagcccggcttggggagaagcctgcagctgtggggtcagcctcccagctgccagcagtaatagcccgagccatggggaggcctcgtttcctaaaaaggcctcagctgccgctgcgttcctgcagggtggaaggacaggctgatgaccaccagcgaagtatcatgaaaatctcccggcgagcctatgagccgtacatttgtctctctctagagacaggcttctcctggagccaatcagccctctggctttcatgggctcctaccttgcaaggtggccacaggcctcagccgtgcctgtgttggcagggagccctgtgcactgcctctcttctgcccgcggggttagcatggcaggaacccgggctggaggctgggaacacgtccaggctcacgctggtcctcgaggtggctccagccttgctgctcttggcagcagagatggcggagggtctaggtctcaggccagagatctccaaaatggaccagcccatccccttccatcatgaggaggagacagggccagcacgagaagggaaatatgctcagggtcactcagcgaggccaaaatcctgggctgccttgttcttgactctaggatctagaaatgggaaagctgggacttgtcgcctccccagtgatctatcttttacacacgcgtgttttcatgcactgagccattcataaaacagaaaagccaagcctcctcactgttgtaaaggaaagccctgcgtggctgtgagggagacgcgtgtggaacctcatgtcgtgtggcgccgttggggacccgttgggctcttgagactgaaccgggacaggctgagaggctctccaggacacttccgggcagcaggccccctctggctgtgcttgaccctggcccctgggccctcttggttcaccaagtctcccacgtcctatgctcttgagatcccagactcggcactggatggggtggccctgggtcccactgctgttccagagcactggcccttcctttcggccactcagggtagaggctggagcccctggaatcacacagaaggggcctggctgaagcacaaagggtggagatctggggttaagccagagcctggggccccctgagcccaggggctgggcagctggggaagcaaggagagccaggtgtcactgagtcagtccctcccatgcaggtacttgggggtgtgaggggccgcccccggccttcctctctcacccctacggcctcttccggtgggtgaggacacttggctctgtgtgttcaccataatcagattcaccacaacagggcagaacactaattccactgacaccgctgagatgctgtgtagagccagatgtctgtgggacacggcggccagctttgccagggcgtggccactaggcgctgggaggggcaggatgtgcctgatgcccatatgtctgcatggcagaaaagcacacagagaaccgtggggctggaggtgcagcggccggcgacggccagaactggagaacaggccggcggggtgcgggacgcatatgctgtcccgcaggcaactgggaacacttgctcttttccaaatctgtgctctgacatggaaagttaagtcgtgctgggactgctggcccctggccgcaccgcctcgtccccagctgcagggcctcccccttgatcacagcagctcctccttggtcacagctggggctttgcacaaactccccggaaacccagggcttgcgtttgcaggtctctgggcttttcctgcatggagcagagaacttttccggatggtgtggcttttttcaaggaaccgggctccaaagcgctctgtgctaagtgtgttagctccacttctgatctgtcacgttagtgccctgcgttttagaaaagtatgaacgaaagcctcagcaaaccggatcgaacgggctcattcgcagccatagggtgagcggcaggcagatcttacaagccgtgcaggccggaaggaaaagggttgtggggctcattcttagtcatagggtgagcggcaggcagatcttataagccgcacaggccggaaggaaaagggttgtggggctcattcttagtcatagggtgagcggcaggcagatcttacaagccgtgcaggccggagggaaaagggttgtggggctcattcttagtcatagggtgagcgggagacagatcttacaagccgtgcaggcgggagggaaaagggttgtgccgacagtctgagggtggagaccagagctgtggactcgagcccaggggagcccccacctggccacggtttcctcatctgagaaacaggagtgcgaggccctaccagggatccttcccgctcagatccccagagaggtgggggccgtgaccggggccagaattccacccctcactcactgctctgcgcagcctcctgggcttgtcaagagtttttaaagccctgtcgtgcttcccagcagatgccttgtgggtgtgagcattctcatgggcttgaagctggcagatatttgaaaacatggcagagacctgcagcccgcagcctcaaccgctggctgtcacctgccgctgcctgtgatttactcttgagaagtgctggagcagctgaaaagcaactcgccaccccagcactgccctcagagtgactaatggggcacactggggttctgggccccggccaggctcagcgaggggagggccgttcccggggctgagggccaggggcctcccctcctcctgtcctggagggcacctgcccagcacaggtagaggaggcaagggtgtcaggaaggctctttccctaatctgactaaggccctctgggctaagtcaggggtctcccggcagccaggctgctaagtcaggggtctcccggcagccaggctgctgccagtcccgcagctcagccgggcacagacaggatgtggcttccaggggcttctgttctgccaagtccccactcagacaatggcctctatagctccagcaatcaggagggaaaagattccaactcccacactcagggctccctgctgcctggaagaggagaggagggcaaacctcttgcagaggtgacgggtgactcaccagccccgctcagaggacgggtctgcaggtggccagagttctcctgatggggtccttgcccccagctggcttgggggtccctacaccggccccctgccccacaccatgttcctcccaccccatgtctgtgcgccccttcgagcatgcctgggcattgtccatggtactgaacccctgaggctccctggggctctggcattctcttgagcctttcccagaaattccaaaccagaagaaaagtgcagggaacagagtggaggagccatggacagaggctgtggggcaggctcagtccctgagaggtcgccaaggagccacagccttggactagatgctctcaaaacctggcaatggcccacagaaggcatctgctcaggtgaggtacatgccacaaagcttcaccagtggggatgaggatctgctcataggatggcccctgatggaggaagtgggagctcaggctgtgggatcaggcccctgggttcacaactgtgcctgggtttctttatctacaaaaggagcctgacaggagcctctgcctcacagatgagacctgtgtgcctgaggtggtgcacacagagtatgtgtagaccccaggacagtcgatgtcagctagaaagtgaaggttagaggaattcaaaccgttatttttaatactgagccaaaacctgcacatcagagctctctgatggaggcgtggacggggtcgtgaggggccaagtactagccagaagctgcgccgtccatttcatcccctccccacagtggtcccacagacaccgaggtggctgacatggcccctccaggtcacacgcctgttctctctccagtcctgccctcagggactcagaaatgctggcgttccaggaggtggtgtgtgggctcctcctcaggccaggtctgtggtcactgctgaccacgcggcaatgtacggctttccaggcccccatccaccatgagtcaggcgtgtccccactgggcagcaagtcccacagctttgcattccagatcccagcagcatctcgagccgggcctggtactgcttagatgcctgggagggaggaccgaggaaagagactggggactgagggacagcacagtatcccaagctggccactaccagaaccttctagaacaaggtcacactggcagttctttatgccttccgtcctctgctccccagacacctgtttacacagggccctaggtctcaggtgtcctgtgggtggccgctgcttttccctgggtccctccatggtgtctcctctgaggacagccactggtcagagcctcctggatgacctcactcctggaaagcgctgggctgtgtcaccttaaagacccctttgctctcttggccctggcaccccacctctggcatggggagcagagacccaccagggttcccatccctctccccgcagtgtttccccagttccagggctgtgaggtggtcacagtggctctggtgtggccgtggggttcctgttcatcccagggcacctgtcacgggacatacccacagcacaggcaagtggaacgttctctgagtttagctttgtttgtgtaggtagttcactgtgggagtctagcttttgggggacacacctgagaccctcccagctaccctgccctctccccagatcagctcggtaggctccaatccagagagtcaggctgggaggggagcacggagccgcccctgctggacacgtatcccggccatctcaggcccacccattgcctcattgctccctgcccccggtccagtcagctgagtgccccgtggtgtgggtgcgtcatgccatggcgaccagccccaaagggtgagcctttgagttgttcaccaatcattggggtttcgaacaagcctgtgctgacggccctggcacacagggtttctgaattaactctgccatcgttcctggcctcagctgtggtggggaaggcagttcggggtcatgagaaccctgagggttgctcccaagtcagtgtttgctgggtctagtgggggcctctccacctggagtctgtctgggaggttagaaaagaccgtccgtgagcctgggccctgctggggctggtcatctgctcagggagagggcgatcccctgccagcccagcaaggccaccccagcggtcacccccttgggagggtgtggacaggagcctcccctcccacccgccccgcagcctctgcagccatcttacaaagcctctgggttctgcaaagcaaaagggttttgcaccttcccactcagcacaggctggctgcggagccgggaagcagtgtgccagtctggggctgtctcttgatctaaacacaatgggatgaattagagagaaaggcagaatacaaaacaagcaattgctctcgaagagcgaggtgagaacgccctgcctgaggtcgaggggctgaggccggctgtctggagcctgtgtcgggggcaccctcctgctgtctggctgtgccctcacctgtgggcaggcataccgtgtgcacccctcccgctccccacctggtctccacggccaagctcagaccaaccacccagaggctgcgccccggtccagatccccctaacacacctgctgtttcattatctaacctttcactccacctccgtcctccccatcaaaattacacatgcgagggggcagaggccaggctgtccctcccataggtccagccccaccagccgtcgccccagcgtgtcccatcccagcctcccaagccgcagtcctgtgccccccaatttgcttcctttcccacacccaagggagcacagtcagtgctccaggaactgaggcagcacctctaggctcgctcttttagaaatgaggctgaggggctggacgcagtggctcgtgtttgtaatcccagcactttgggaggccgaggtgggcgggtcatgaggtcaggagatcgagaccatcctggctaacatggtgaaaccctgtctctactaaaaatacaaaaaaattagccaggcatggcggcgtgcacctgtagtcccagctactggggagactgaggcaggagaatggcgtgaacccgggaggtggagcttgcaatgagctgagatcacaccactgcactccagcctgggtgacagaacaagactccgtctcaaaaaaaaaaaaaaatacaaaattagccaggcatggtggcacatgcctgtaatcccagctactcaggaaggctgaggcaggagaatcacttgaacctgggagacggaggttgtgataagcagaaatcgcgccactgcactccagcctgggcaacaagagcaaagctcagtctcacaaaaaaaaaagagagaaatgagcctgaggcccaggaggacctgccgagctcacagctggccagggaacaagccaggcccccacttctggcaccaaaccccaggcattcggctgcttctgagaggcttgaggccctaccaaccactcaaacgccattcccagacccagacagggctaggaggcaaggggtagcagctgaggggtgcacacagcagaggatactgccagaagcacgaatgagattcccatggaggcagccccacctccagaccaccacggctgtcacagcagacacccctgtctcccaccatgaccttctgctctggaacatccacccctaaaacctcagacccagccactgaggcccatggcccagagcccagctacccagccggctccagggagggtggcccagccagttcctgccacctgaggatgttggtacacacaccagactcagagggagacccagacagacagcaacacaaagacagagagagagacacagagaggaaagcagagacacagagagacatggagagagacacagagacagagaaacagacacatagaggaaaacagacacagggagacacagagacagagatacagagacacaagaaaacagagacagagatagagacagagacacagagatatagagatagagacacagactcaggaaaacagacagagagagacacaggagaacagagacacagagatacagagatagagacacaggaacaacagagacacacagacagagacagacacaggaaaacagtgaaagacagagacacagaggaaaacacacagatatacagagagagacacaacagagacagacacaggaaggaaaacatacaaggagacagagacacagaaaaacacagagaaaaacacagagacatcacaggagaaagatacaaagacagacagagacacatattctgcctcgcctccaaatccagcttggcgtggacctcgctgggactggatggccttctctacagctgctgaacagcctcgccgtccccagggcttccctgctgttggccatgaccctcccctgctgcttggaattgcaaagccaggcggtctgggagtcccagccaccacgcgtcccccagaatattcatggggctgggccaggtgactccctgctctctttagagacaaatcgaaaggcgccagggtgctgtggcatcagtggcgctgaggcatcctctggccggccctgcatggccttcaagctgcttgagtccattggacaaagtccctcaaggccaccctatgtggccagggctgagacgcctagagaggtagacgctcagcctgggcagggacgggggccacactagcagaggtcagagaaggggtcagccagggggaaggtcaaggctgccgcccggcgggtcaccaccaggcccccacactaccccagcctggccgtctgcttcctgttcagttctcaccccctgagttctcaggtctgtgagtttgctggaccgtctgccaggagagcttagggtccctgtaggcttgtgggtgccatcaggtcagagatgagaagtcacctccaagcagaggccttcccggaacccccagcactactgcagccaggctgccgccagcatcgctgtgtctgtagctcttattggccctgaagtcactgcaggtggttctttcagtggtctctcctccccaggatccaagacctctgacggcaggggctcctatggcttctccaaggcagtgatgtttgtgggagggaggaagggagaaaggtggagggaagctagactaaccaagaaaaaagagagaagacatagctaaaatcagatatgaaagaggagactttacaagatgccacagaaatcaaaaggatcataataaactgtgaacaattttatacaaaccagctggacagcctggaaaaaatggatacattcctagaaactcacaagcttcctagagtcaatcgcgagaaatggaaaatctgaaaggaccaataacaaagaaggagattgaatcagttaccaaaaacctcccaaaaaagaaaaccccagggcagggccaggttgcttcgccgatggatgctacaaacatttaaagaagaattaacaccagtccttatacaattccgaaaatgtgaagaggaaggaacactttctaactcatcttacaaggtcagcattaccctgataccaaagccagagaaggacgctatgagaaaagaaccaagaggcaaaaatcttcaacaaaatactggcaaacttcattcaacagcatgttgaaaggctcatccaccatgagcaggtgggatttatccctgggatggaaacacagttcagcacatatgaatcagtaaatgtgatccaccacatgaacagaaggaaggacaagagccatttgatcatctcatttgatacagaaaaagcatttgacaaaactcagcatcctttcatgataaaaacactcaacaaactgggtgttgaatgcatgctacacaataaaggccacgtatgacagacccacagctaacaccacactcagtgtaaaggccacgtatgacagacccacagctaacaccacactcagtgtaaaggccacgtatgacagacccacagctaacaccacactcagtgtaaaggccacgtatgacagacccacagctaacaccacactcagtgtaaaggccacgtatgatgacagacccacagctaacaccacactcagtgtaaaggccacgtatgacagtcccacagctaacaccacactcagtgtaaaggccacgtatgacagacccacagctaacaccacactcagtgataagaagtagaaagctttttctctaaggtcaggcaaagcaaggatgcactactcaacatggtcctggaaggcctagccagagccattaagcaagataaagcagtaaaaggcattcacatcagaaaggaagaagtaaaattgtctctgcagatgacatgaacttatgtatagaaaaccctaaagactccacaaaaacaaaaacaaaaacaaaaaaaaactgttagcactaataaacacattcaataaagttgcaggacacaaaattggcatatgaaaataagttgtgtttctatacactagcaatgaattatcccaaaaagaaatcaagagggccaggcgcagtggctgacacctgtaatcccagcagtttgggagcccgaggcgggtggatcacctgaggtcaggggtttgaaaccagcctggccaacatggcaaagcccagtatctactaaaaatacaaaattagctgggcgtggtggtgtgtgcctataatcccagctacttgggaggctgaggcaggagaattgcttgaacctgagaggcggaggttgcagtgagccaaaattgtgccattgcactccagcctgggcaacaagaatgagaatctgtctcaaaaaaaaaaaaaaaaaaaatcccatttacaatagcatcaaaaagagtaaatttaatcaaggaagtaaaagacctgtacactgaatataacatgatgaaagaaattgcacaaataaatggaaagatacctcatgttcatgcattgcaagaattcatattgttaaaattttcatactacccaaagtgatctacagattcagtgcaatccctatcaaaatttcaatgacattttacacagaaatagaaaaaaaaatcctaggattcatagtgaaccacaacagacctcaaatagtcaaagcaacattaagaaagaggaacaaaactggaggcatcacacttcctaatttccttttatattacaaagctatagtaatcaaaacagcatggtactagtaccacatagacccacggaacagaacagagagcccagcaataaacccactttcgtacagtcaaatcatctttgacaaggtgctatggtttgaatgtcccctccaaatcttattaaaacttcatccccagtgtggcaggattgagaggtagagcctttcagaggtgatgggatctgtgaggactggaccctcatgaatggattaatccattcataaataaatgagttataggattaaggggcaatcacacaaggggagctggtggctttataagaagagaaagagagacctgagctagcatgctctgccccctctgcacgcgatgccccatgccacggcggaacttttccgagagtccccccagcaagaaggctttcaccagtcgcatcccctgggccttggacttcccagcctccataaccatgataaatacctgacttttctttgtaaattacccagtttcaggtcttctgtcataagcaacataaaatggacttagacacaagggcaccaatacacaatggggaaaaagcagtctcctcaaacagtgatgggaaaactggatatccccatgcaagagaatgaaattgtaggccgggcgcggtggctcacgcctataatcccagcactttgggaggccgaggtgggcggatcacgaggtcaggagatcgagaccatcctggctaacacggtgaaaccccgtctctactaaaaatacaaaaaattagccgggtgtggtggcgggcgcctgtagtcccagctactcgagagcctgaaattgtacccttatctcacaccatgcaaaaaaaaatcagcttaaagtggattaaagatctaaacataaaacctgaaactataacactgctaggagaaaacatagaagaaaagcttcttgacattggtcttggcagtgatttttttatgacagcaaaaacacaggcaacaaaagcaacataaatgagactacattaaaatgaaaagtctctgcacagcaaaagaaacagcaaaacgaaaaggcagtctctacaaaatgggagaaaaataacccatttaaaaatggaaaaggggcctgagtagacatttttccaaagaagagctacatatggccaatgggtttctgaaaaggtgctcaacaccactagtcatcaggaaactgcaaatcaaaaccacagtgagctatcactgtacacctgttaggatggcgatcatcaaaaagccggcagataactcgtggtggggacaatgtggcgaaaagggggccccggtgcactgttggtgggaatgtattaaatgggtacggctgttacggaaaacaggatgggggctcctcaaaaaaagtaaaggcagaaccaccgtaggatccagcaatcccacttctgggtatttatgcaaaggaagcggaatccggatcttgaaaagatccctgcaagcccctgtccgctgcggcactgttcacaatcgccaagacacggaatcaacccaggtgtccctcagcagacccgcggatcgagagagcgtggtgcagatacacagcagagtgctgctccgtcttgaaaaataagcagatctggtcatttgcggtagccgcaacaaacctgggggcattatgctaagtgaaataagccaggcgcagaaagacaaatgctgtgtgatctcgcttatgtgtggaatctgaaaaagccaaactcgtgaagacagagagcagagcactgagtgctgggggaggggaacgaggaatggggagaggacgatcaagggctgcaaagtttcagttataaggcgagtacattccggagctttgaggtatggtgtgaggaccagagttaacaatactgcattgcggccgggcgtggtggctcacgcctgtaatcccagcactttgggaggccgaggcgggtggatcacgaggtcaggagatcgagaccatcctggctaacatggtgaaaccccatctctactaaaaatacaaaaaaattagctgggcatggtggcgggcgcctgtagtcccagctactccagaggctgaggcaggagaatggcgtgaacccgggaggcggagattgcagtgagccgagatcatgccactgcactccagcctgggcgacagagcgagactccgtctcaaaaaaaaaaaaaaaaaaaaaacaatactgcattgcacactcaaaatgtcctcagagaataaatcttgtgttcccaccataatcaacgggggtaactgtgaggtgacggatgtttcattagctcgatggcggtgatcatttcacaatgtatacatagatgacaacatcacattgtacacagtcaatagatacaaatatttttgcgatgggcgtctcactctgttgcccaggctggagtgcagtggcgaagtcatagctcactgtagcctcaaactcctgggctcaaacaatcctcccatctcagcctcccaagtagctggcactataggcgtatgccagcatgcctggatgattttttttagtttttgtagagatggggtctcactgtgttgcccagactggtctcaaactcctggcctcaagggatcttcctgcctcagtctcccaaaatactgtgattacaggaatgagccacggtacctggccaatagatacaatttttatttgtcaattatccctcaataaagctgggggaaaaggttaaaaatatatacatttaaatttaaaacttccatgatttcttatagtaatgttacggtttttggttttaggttttaatcttcttaccatgtggaatttttttggggtaagatctctatgagttagggtactaactccaggaactaagtcaaattgtcttatcccttaagaaaaggaatatttatttcactcaagacacactgaaagtccaagaataatagctgcaggcgcagcttgacccaggagcacaaacaatgtcatggggtgccccgcttcaccggtgctggctttattcttaggcaggtcttctctaaaaggtaggaaaacggcactgacggccacggatgcatttcctgctcagtgagcccaggcaaagctggtgtctagcaaaggtttggggctggccctcatcagacaaatgtgactgatgcaaatgtttggctgacctgtccaatgagggcctacccaggccttttgggatgtgttgattggccaggtctgggccacatgccagtgggatggagggtgcacggctccccaggggaaggaggcgggtgggacaggggccctgaggacccagcttcctgtggtccaggccgtcagctgtccagcgccatgcctgggtggccagtcttctccccgatgatctggatgctgtctccatcacagatggagcttctgtctgatctggcactgtcgatgccaaattctcctcattaaggtcactctcagtgacactcaggtacatcccagtggctggcaaggctgacgctcccttgtcctagcgacctgcctttcaagagcctttctggccattctgagactatttcccacttgaactgtagagtccatgtgtctatgcacaacagctctcgtgttttatagggactggatgcacagacgtgatctcaacgggtccttctgtccaggaaggggcctgtccttcccctcgctcagtcctcccctcacctcccctcacccccagcagcatcgcaggctttcctccgagtccccgcgctgccgatggacgtgctccctttgcttgttgtggaggtggggggcagctccttacccagagcgggagagattacaggaaaggacggcgcaagccaaagcccctgcttccagctgtgcgtctgggaagagaaggccggccccaggagtcggggtgcattcccctcaccccccaatcctactcggcttcagtctccagggtgggcaggtgggggaggcgggggagggccagacttcctctgcaaggccccgcctctgtccccacacgtggccctgcggcagactctgttccctccctctggaaacggcaggatcctccaacgggggcagccagggggccggggccagaccctacaacccaccagcccccagaggtagctatttttgcagccagccgtgttggtgaggttggtattttaaatgttttgacatttaaaatctgtgttggatacattggtgctgtttaaactatccccgggctgcggtgactcacagggaatgggtttatctcctgaggctgggcctggcctcccctgtccccgctcccagcagccggagtgggaagagggagtttttacctgcccccagtctcaccagcaccttgttgtcctgcagaaggtggacttcggccagagcaggagaacaggagggacgcgggacggcctcagatccggacgcccaagcaggggagggcagaacagacccgccacccagccagggtcagcagcggtggtggtggctctcaggagcccacacaggtggcacgagcaaggggcgctgggctggcaggtgcaggatgctgcctcccgggggtttgagtgccccctctccatgcatgtcctctgatctgttagcagaactctgctcaaatggaatgtgagggtaaactcaggccgcctccttcctgaaggcctctgagtgcttctgagtggagccgggagcttcgatgggagcaggaaggacctccagaggtgcctcagccggtgcccagagggggccagggagaaaacctgccgacattcccacgaccccagcacctctcagtggctgccctgtcccatggccaccgccgccttcattagcgagacacggcgaggattgtcctcaccgggaccatcctgacttggactgttgaggccatgtggctctgccctcccttgtggcaggaggttgggagggaggtggcccctgcagcccagcccagggaatcccacggcagatacccctggactttctaccgcaatcacagccaccagccacagagctagtacaggccgcttctccaagacacccaaaagcttcttggaatcagaaattcagcatgaggatcccgggcagcttggcagagagggggcagcctccgtccccggcacaggatcgaacccgcaagtgtggcagccaaagacgccaagatctggcttgcagagaagagcatcttacaaagaaccgaaggccaaggaagattttaaagccattgatggctgttattccactgccccagggaggggtgccggtttctccattggaagccgggccatggccgtcctggctggttctgctgctgccagtccgcagacatgtccccttcctgttctgagcagcagctctggttgaggaggaggctaggccactgcccatctggggaagtcacagccaccctgccagtgcctacagagtcacgtctcagccaggagtcgcagaaggagcgggactcagctcaggccaggctcaaatccaggcacagccccccttgcgctggagtctttgggcaggacctctaccctgtccaggactcggatcaggtgcagggtagctatgatgacccagccttgtgggttgatgtggaagctagaggtggggagtgggggctccaggtgctgataacaggggccctatacctttcaatgctctgagaggtagctggggtgggagggaggaaggggcctctattagtgtgagctgtcaggacctaggagaactgtctgcacacagctacaaggccagggcttgactctcccacaggacgggccttggggtggggcagccacgtgcttgtgggcctcagccatgcacacaacatgtccagacctgggaacctagagcctagggcctttgccacagctgggacaccccagtggttgtgttccttgctgtgtacaggcgggaccctcgggagggactcatgaaagtaggggagtctgcaaacttcttcccagtcagaggcagggtcgggggcaggctgagggccagcttacaacagcagccaggggtggccatgtcttccgggcagccgggatagggccggacctcctgaacttgtgttgactgagcacctcacactgagcaggcctgacaccccaatcagcacggcaggcatcccagctgagggtgcatgagtcccgctgctggctctgacagcctcgcccttcctctcctgcaggtcaacaccttcatgtccttcatattccccatggtggtcatctcggtcctgaacaccatcatcgccaacaagctgaccgtcatggtacgccaggcggccgagcagggccaagtgtgcacggtcgggggcgagcacagcacattcagcatggccatcgagcctggcagggtccaggccctgcggcacggcgtgcgcgtcctacgtacgtaacctctgggccctccaggggcgggaggcaggccagggctagcaaaggcagcgagcgctgaaccaccccaagcctgggcaaggtttaaagacatagggatggagctgtcaggccaagacccaagggtgccagctcccccgaggggtgagtgccattctgcactccatccctccctccatccttccatctatccttccctccctccatccatccatccttccctccctccctccatccatccttccttccctccatccatccatcccttcctccttctatccctccacccctccctcctcccttcatccctccctccatccatccatccttctctccctccttccctccattcactcctctacctctccctccatccatccctctctccctccttccctccattcattcctctacctctccctcccttccttcctccctccctccatccatccatccctctctcccttcctcccttcatccctccatccaccctccctccctccatccatcattccatccatcatccctccatccatccctccatccatccatccatcctccctccatccctccctccctccatccatcctccctccctccatccctccctccatccatcctccctccgtccatcactccctccctccatgcattctccctccctccgtccatccctccctccatccatcctccctccctccatcatccctccctccctccatccctcattccatccctccctccctccctccatccctgccttcatccatcctccctccctccatccatcctccctccctccatcatccctctctccctccatccctcattccatccctccctccctccctccctccagccatcctccctccctccagccatcatctctccctccctccctccatccctcccttcagccatcctccctccctccatccatccctccctccctccatccatcctccctccctccacccatcatccctccctccctccatccctcattccatccatccatccctccttccatccctccttccctcccttgttccattcctccctccctccatctatccatctctctgtccatctgtccacttgctcacgtgctcacttattcatttgctcagcagttggctgagtgcccaccctgggtctcgcctattcttgctcacaggcatggaggcagcagaggcaggggcatccctgcactctgggggaacaggggctccaccaaggacacaaacacaggcaccaggcaccttcagccagtgatgagcatgaagaaaaaaataccaccaccaccacccctgactacatctggcagctgggaggggctctcagagcaggtggcatcctgcaagtcccaaggaccaggagcccatctgggcaacagagctgcaggcgaggggatggctggagcaaaggccctgtggtgggaggtgcttggcaagaaggcggggcaggggcagggcagacgctgccaacaacacagggcttggagagtgtgatgggaactggagagaatgaagccctttcatgcctgagacccaggtcttcagtttggtttgcctgaagcatttggcttgagctcctccctggtgctggcccattttcagggcttgtttgagggtgtggccagtcacaggagaggcccatagccaagcacattaccctaagagagcctggctctgggctcagccttccctgctcatgggaaccagccagggctttggacacggagctctcagggctggcgaagcccacagcagggcaacgcccatcctatcggaaccctgaggaccagccccagctcaggacggctggcttgccaacatccaaggtgtgtcctggtcccagtgtgtgcctgttgttttaatagtagccatcctaatagatttgaggtggcatctcgttgtggttttgatttgcatttctccagtgatttaagattaatgattaataacatctttcatgtgcttgttgaccatttgtatcttctttggagaaatgtctgagtcctttgcccatttgtgaattggattgtttgttttcatgttgagttttaggagttatactctcaaggttaactcattatcagatgtgatttgcaaatattttctccttttttgtgagctgacttccactctcctgatggcatcctttgatacacagaaattcagtgtttatgttgttcaatttatctacttttttcttttgtggcctgtgcttttggtgtcatacccaagaaatcattgccaaaatcaatgttgtaaagtaattatgttttctcctaggagttttatggttttagttcttatgttcaggtctttaatccacttcaagtccatttttgtatatggtgtgaggggaggatccaccttcatacaagtggatgtcccgttttcctaacaccctttgttgaatagactgtcctttccccactgaatggtcttggtgaagatcacttgaccataaaggtaagggttcgtttctgagatttctagtctattcccttggtctacgtgtctatctttatgccagcaccacactgtaactttgtagtaagttttgaaatcaagaagtgtaagacctccaactttattttcttacaagattgttttggctgtccgggatcctttgagatttcatatgaattttagcacagatttttctatttctgccaaaagcattcttgaaatttgatacggattgcattgaatctgtagagtgctttgggtagtactgacaccttaacaatattaaatcttccaatccatgaacatgggatgtctccctgcatctccctcagaccacgtgtctccttctctgaggccatatctctgtgtctctaagcccatgtctctgagccagtgtctacctccctcagcccatgtctctccctctctgagcctgtgtcctgtctctgagcctgtgtcctgtctctgagcttatgctccctccccaagcccacgtctctccctctctgagcttgtgtctggtctctgagcccatgtctcccccactgagcccacgcctctgtgcctcaggtgcagtgggtctctgagcccacgcctctgtgcctcaggtgcagtgggtctctgagcccacgtctctgtgcctcaggtgcagtgggtctctgagcccatgtcctgtctctgagcccacgtctctgtgcctcaggtgcagtgggtctctgagcccatgtctctgtgcctcaggtgcagtgggtctctgagcccacgtctctgtgcctcaggtgcagtgggtctctgagcccacatctgtgtgcctcaggtgcagtgggtctctgagcccacgcctctgtgcctcaggtgcagtgggtctctgagcccacgtctctgtgcctcaggtgcagtggtcatcgcctttgtggtctgctggctgccctaccacgtgcggcgcctcatgttctgctacatctcggatgagcagtggactccgtgagtaccgggaaccaggaagttgggtgctggacaagtaagtgctcccaaaacagatggtgggtgtggcaggcactgctgaggggatccactcagggcaggggtgtggtgagtcccccggcgaccccctgggcagggttgtgctgtgactggggccgggagaaggccatggagggacaggttcaaggcaggggctattcaggccagactggtgcagagaaagaaagttggtcctaagagagatggcccaggcagtttcccgaaggtgaaagagagacatccctggctctgctggggacatggtgggggtgtcacctcctcatatggcagctgtcagagccccaaggccacccaggttggacccacagggctcagcctggagttatactcagggctgtgacttatcgcagcaagagcaccaatactgacaaagctttgcttatacagcaaagtcagcaaagggaaaagacacatggagtggggtcagcggaagaccagatgcagcttccagggccccctcccagaggagcctcacaggacgatatgggggccgatcacaggggcacccactgcctggcaaaacccctactgtttgcaccaacagttcaggggcagggagcccttctcacccaaaaatggcagagccttcccaaaatccaaggccccaggcaccagccagaggccagccttgccagctggccatcctgagatggcagcttggggcccacttgtgaacccttttctgtgcagtggggctgccagatcccagaataaaaggttccttccagtgacaaccaccagggagggcgcacctacgaccaatgaggaggagaaggcacggggaacagagtgtggcccctgcaaaagcttctgaaactcagggctgactggtagtaattgagctgcctggtgagggagtgagatcactgtggggggaggcaacaagctgagggcaaggtgtgtggctgctggggaggtgtggagggggttactgccctggctgtttggttaggccgggaccagccaagccctggacccttggatgcacagagctgcgaagggcaatgcaggcagctgcaaggagaggcagggatggacaagcagagcccacgctccacctaaagaagcccaggctgggtgggacacggtggctcacgcctgtaatcccagcactttgggaggctgaggtgggtggatcacgaggtcaggagatcgagaccatcctggctaacacggtgaaaccccgtctctaccaaaaatacaaaaaattagccgggcgtggtgggggggtccctgtagtcccagctactcgggaggctgaggcaggagaatggtgtgaacccgggaggtggagcttgcagtgagccgagatcgcgccactgtactccagcctgggagacagagcgagactccgtctcaaaaaaaaaaaaaaagcagcagcagcccaggctgggcgggagcacgacgagaacttgcagctgctcaggagaagccagaccctggagcttgttatgaaatgtccccaaacaaccattctcaaggggtgttttaattagcgtctgagccaccacgtccctcagccgctgtggccccggctgtcaccctgccttggggccctcaagagttctctctgggatctgagcgcctctctctccccgcaggttcctctatgacttctaccactacttctacatggtgaccaacgcactcttctacgtcagctccaccatcaaccccatcctgtacaacctcgtctctgccaacttccgccacatcttcctggccacactggcctgcctctgcccggtgtggcggcgcaggaggaagaggccagccttctcgaggaaggccgacagcgtgtccagcaaccacaccctctccagcaatgccacccgcgagacgctgtactaggctgtgcgccccggaacgtgtccaggaggagcctggccatgggtccttgcccccgacagacagagcagcccccacccgggagccttgatgggggtcaggcagaggccagcctgcactggagtctgaggcctgggacccccccctcccaccccctaacccatgtttctcattagtgtctcccgggcctgtccccaactcctccccacccctcccccatctcctctttgaaagccagaacaagagagcgctcctctcccagataggaaaagggcctctaacaaggagaaattagtgtgcggcaaaaggcagttttctttgttctcagactaatggatggttccagagaaggaaatgaaaggtgctgggtggggccgggcctccggcggcccggctgctgttcccatgtccacatctctgaggcctgcaccccctctgtctagctcggggagtccagccccagtcccgcaggctccgtggctttgggcctcacgtgcagaccctgccatgcagacccatgcccccctcccccaggcagctccaagaaagctccctgactcgccccttcaggcctggcaagctgggggcccatcgccgtggggagtccctcccaccaccctcgccgcaggcagctgcagcccccagaggggaccacaagcccaaaaaggacaaaaatgggctggcctggaatggcccagaccccagcctcccctcctccctcccatcctcacccaggccaaggcccaggggctctgccaggacaccacatgggagggggctcaggcctcagcctcaagatcttcagctgtggcctctcgggctcggcagaagggacgccggatcaggggcctggtctccagcacctgcccgagtggccgtggccaggatggggtgcgcattccgtgtgctttgcttgtggctgtgcaggctgaggtctggagccaggcccagagctggcttcagggtggggccttgagaaggggaatgtgggacaggggcgatggtgcctggtctctgagtaagatgccaggtcccaggaactcaggcttcaggtgagaaggagcggtgtgtccaggcaccgctggccggcagccctgggctgaggcacagactcatttgtcaccttctggcggcggcagccctggccccggcctccaagcagttgaaaaagctggcgcctccttggtctctaggatccaggctccacagagcacatgactagccaggcccctggcttaagaaggtcgcctaagcctaagagaagacagtcccaggagaagctggccgggaccagccaggagctgggagccacaggaagcaaaagtcagccttttcttcaagggatttccctgtctcagagcagcctttgccccagggaaatgggctctgggctggctgcctgcaccggccatgtcgacccaggacccggacacctggtcttgggctgtgttcagccactttgccttctctggactcagtttccccgtctgagaaatgagagtcgaatgctacagtatctgcagtcgcttggatctggctgttgagttgacgggttccttgaaccccacaaaatccctctccaaccacaggacccttcggctcaccaagaacagggcccaggggagtcaggcctattcgctgcacttcctgccaaactttgcccccacaagcctggtcatcagccaggcagccctcccagtgcccaagggccaccaaccccagggaaacagggccagcacagaggggccttcctcccccacagagcccccatgacatagtctgctctgggcggaagagctttgctgccagccagggatgtccagaggtcagtgcagcccctacccctgctcaggagtgggctcagagtctagcaaatgctaaggcccctcaggctgggctctgaacgaggacctggactcagagccagacagggcagcctcagacccttctctggggctcctggaccttgggccataatttctgagcctcggtttccccatctaaggaacagatgtggtcgttccgccctctcagctggatgagactgtcctggaggatccaccccggaacagacagaatggtgtctctcaggatggtgctctgagagagggcagagtggatgccccactgccctagaccctcggtagacgtggggtctctggggcggggtctgtggctgtgactgaagtcggcttttcccgttgatgtcttgatgctcctatctgtgcacttaccgtaggtagggacacgtgtccacgcaccacagacacacccacgacacctgatctcgtatcactagcttgcggccaggtcatgatgtggccccggaagctggccctgcgtgccatgagtgcgtcggtcatggagtccggagcccctgagccggcccctggtgacggcacagccctcacagctcaaacgcccacccccactcccaccatctgcaggtggtgaaaacaaaccccgtgtatctctcaataaaggtggccgaagggcctcgatgtggacttgagtgttgagggcctgcatgtgcccacccacccactcattcattcactccttcattcagacacgcaccgacgcagcagccagcctgcactgggcctcttaccaaagtctacagggctctggtcccagaagctggcgggtggggggcgccgggatccctctgctcacagcccacccaccctccctagtgcttcaaggagcagtgggccccctgcagggcctagtgaccaccgaggggcctgtgtgggcaaaagtcctcaccgtctcctgagcttcagtctcctgatctgtgagctgaacacagaggacgctcagtgaagcggggagcccggggtcccatgaccgctcagctcagatctccatggccccctctagccagcccaggggtcctgtggttgtgggggagggggccatggccccatcgaggccttagcagtggacagataggcccgggtgcagtactgagcctctggcctgggcccagccccgtgcaggctactgaggagacagaagatgcagctgaaccctcacccccagggcttctgctctgaaaatgagggttcccaggcacctcccagacccaccgtttccaattctcccccgccaaggcccgggtcattctccatccctggttgggcggctctggctctctgctgtgctcctttttagggcaccaaaagcttttctccggcttgcctgagcctgagccacaagaggccggtgacagcagagtctgcagggtggtgccctggggtctttctcataagcctcctgggcctcaggattaggagtgctgggctcaccctgtggagctcagcaaaagaagcatttgcttgggcttgaacagtccaggaaggctgcctggaggaggaggcaggtgggccagtgggaggcagagcctgagcaagggagagtgcaggagtgaggggtctccccagggacatgaggggctcagagtggctggagaggagaagggcaggtgctaggggagcaataggggagggagaaggcgggttgagagcttgagggatttgagcgcccatggaggggctgagtaggggcctagggggagaggggaggagccttggggccctcgtggtcaggagcctgccatggttcctgggtcctgatggcagggagcaccccttcctgagggggtcctcttggccgtcctcagcagctctggccctgcctccacctccctgcagcacttagagattctctaagtgttgttttcctgtgcctgggggctcaggactccttcctttgggggcagccaggtggcagcagggctgggaggggtctgggtgagggtggggagataaactataaccctgatcatctaaagggatcttggcacacgctgccaggcccctccctcccagcacccagcactcaccttcgcctgccctcccaagcggcgctgccccagatccccaccaggctcagcctgtccttatctgtgctaaagcgttagtggccacagcatctcctggtaacaaagatccccacaccttaacccaaaggacagcagaaacacaggacaaccccacccaccctaagggcatggtcccccaccttcccctccgagccgcacctgcccagctcagaggtggggatggcttgagtgaggactcctgggcccctgattcagaagaggctgcagggtctccgggaagaccctctcacccaacagctgctctctctaggaagccttaaacccccgacagagggaagccagagccaggaggaggccggatggggacgaggagagcctgctgcctcggggtcccgcttcccctcggctgtgcgtggccacaaggtgggcacagggagagggcacccaccatgtggagcccttggggggcctgtgttgtgcacccagaggctgcgtggcgagcactgggtgaagaggggatgccagctcttcccccggcagcacagcacagccatgagcgcacaggtggtgacgcacagggtcctgggctggactccagctctgccactgtgagctgggacgtgggataaggtggaagttagcactcagggcccggcccgcaggaccaaggttggccgcgtcaggggagctgggagggaggcggaggctgccttccttggcatctggccttggcggccaggccagtgtccctcctggcccagagcggtacccgggccctcgactgctgccctccacgggctccctgcctgaacctgtccacaccccgattcgtccccagagttggacactccgtgatgtttaaggttaaggaattggtgtcaatcatgagcttcatgcctggctgcccggctccttctctgccccggcctagtctgagccccctccaccaacagtggagcctggtgccacccgctcctgtcactctggaggtggcccagggtatagcactgcctgcaaccaggtccctgctctcctctccactctagagcctctctccccttcaagcctctccctggtctgaggctccctcccctctgagcctccctccgagcctctcttccctctcctctcttctccctgctcctccctctccctgcttcctccctggagctgggggctgtctctctgactgcatctctggaggaggaggaagaggattgggagacaggactttaagcgcagattctgccaggcatcacctaggagccctggctgaacccagctgtgtgtagggagcctccggccgccctggggctcagcatccttaggtcattgttcccatttgactggccaaggaagccaaggctctggtaatctgccaaggacccacagcctccctaagcttgaagaccatggtcctatcagccctcatgtgctcccggtgacccaccctgcaggcccacaggccgaaggcgagctccacctgtttcacagctggggacgccagggagggggagagctgcacggagctggtgttggttctgccctcgccattgtgggaccttcagaagaccccacctcccaaggaccgtgaccccctcctggggagggcacgcctccccaggagctgccaggtgagaaaagcacccagcctccagcacaccaagacccaggagcagtgagagggcagagccaagctgctgccccagggactggtagggaccactgatggcagtggcaggaggaagctccaggctgcggggctcagagagggatgaaggacagggtacgggttgctttgcccccaaatcagagatgctcacccggcaggagaccctgcatgcccaggctctcccacctcagcctcagacgccgagctgtgtagacactgtccaggctacacccagagcctcctggggtctgcttcagcctctgggaaccatttggctcctctcttccccctggggggcatggggaaagcatgccagggaggaacgctggttgggcagccaggcagaggtggatgtggcgggctctcaccccaggcaagttgaccaaaagggtgaccgcagcaaggtgggctctgcaggggaccccaggacgctggtcaggctcaggggcagggctggggcgcaggttgggagggcagaggtgaaggagcaaacacaaggcatgggtggtctcggatgacgggcaccctcccccacccacccattcaggtcctcgccctcattccccacggcaaattttcacacgggctgttagccaatagctattttttaactctggctacatttttaaagtaaaattattggattcagacaacatagttctccttaaagtaagaaagtctgtgcctaaagccgggaggaataagtaccatttggtggtgagtttcagtatcaccccaataaatcatggggtgccacatggcatggaggcaaacccagatcaacaaccgagagaacagtcactgcccctcctcctgcccgccctcctccttccactccgtgcttccctctgagccccccactctccctcccagaagaccgcctagccccacagccctttcctttctctggggtctttgttacattgaccaccatcccgactggcttccacttggtttctcccggcttttcgcacacccacggctcttcatgactgagacccagcaagcgggagcagcctgaggtccctgtggtctttccagttctgcctctctctagggatccctgggctctgtgccaaggaggaaggagctggagcagcgaggcaacaaggtcagcctcctcccgggtgggcaggtgggagcagcagtaagatgcgtggggaccaaggacacaccaagcgtccttcataaacaccccgtaggatccacagccacacacacgccagcgtttaaagaactgaaaaaggctgggcgcggtggctcacgcctgtaatcccagcactttgggaggccaaagcgggcggatcacttgaggtcaggagtttgagaccagcctggccaacatggtgaaaccccgtctctactaaaaatacaaaatagctgagcgtggtggtgggcacctgtaatcccagctacttgggaggctgaggcaggagaatcacttgaacccaggaggcgtaggctgcagtgagctgaggttgcaccactgccctctagcctgggtgacaagagcaagaactccatgtcaaagacagagagaaagagagatagagaagaaagaaagaaaagaagaaagagaaagaaagaaagagaagaaagaagaaagaaaagaagaaaagagagagagagagaaggaaggaaggagaaagagagagagaaagagaaaaagagagggagggagggaaggaaggaaggaaggagaaagagaaagaaagaaaaagaaaagaaagaaagaaagaaagaaagagagagagagagaaagaagaaagaaagaaagaaagaaagaaagaaagaaagaaagaaagaaagaaagaaagaaagaaggttgaaggaaggaaggaaggaaggaaggaaggaaggaaggaaggaaggaaggaagaacccagccaccatctgcttctgagctgatgaggccctccctcccatccccacgggaggacacccccacaggaggacgagaagacacccccatggcaggacccccctgagggctgacagccccacagaagtgccttctgcgccgggtgtgtccctgcctcatcccccttcccacctccctgcctctgcctccatctcacatagcagaggggtcccccaaacccccctgcccagccccaagccactagggcagaggcagggccttgttgacagccaaacgctgtcctctgggggacaaagaagaaagcccctttcccaaccacaggcctccagtgctcctgctgcccctgttccctgtgtctcctgggcaggcagatgggcgggctcacgtcagaaccaccagggagcctgttccagaccagtttcccaggccccagctgagccccaggcgatcagaaggtagggtggcctgggaatctgcatgttaacgacttatccaggagagtcagatgcgccctggggtgggagagccacctccctataccttcccatccatccatccatccatccatccattcattcattcatctgctcagtgctcctcgggacctggctgactcggcacccccctggctggcacagaacggagggtgtggggctctgctgccccagcccctgcaaggaattctcacaacccccgttcactccagggcataggagatcactgcaccccaaccggaggaacactgacattgacgacaacatcataggaatggaaatacaaccatggaattccagctcagtcatggagcgggagatctggggacactggccgggcagcctgccccaggcacccctgaactccagtcccctgaagccagagcccgggtcaagcccctccccacccagcaggtctgccgagctccgccctgttccagcacagagacagaagcccatcggctaggaggcccacccaggaggacagtgccggcccgtcgccatcgcgaggcaacaggggagctcttgagagagaattctatacactctaaatacctctgaaggaagaaaaaccagccacagccattgagacctgagcttcctgtatagaaaatgttccctcctgcctccaccctctctcccagctccccaactccctgcaattatgactggaattccagtttttatcagagcaccatggaaaccatggccaggctgaatttatgaaaggaatgacgccaagcagagagagaaccggtgaggggaaggcagggagccaaggcagggcaggagagcaaggcagacgaggaggggctggcacccgcagggcgcccgcagcacgtggtgagtgggccctccccagcacacgtgcacgtatacacaggcaccccatgcacatgcacacagcatgcacatgtgccagcgcatgcatacacacacagacacacgtgtacacacaggcacacttgtgcacatacatgaacccatgggcacacacccatgtacatgtgccagcacatgcatatacacacagacacacatgtgtacacacaggcacacttgtgcacatacatgcacccacatgcacacatttacactcaactcacacacacacaggcaaatgcatatacacatgcctgcacgcacacacaggcatggcatgtgaacatgagtgcacacacacaagtgctcacacccgggcacattcagcctgcatagggcctcccatctcaccaggaagggctcgttccttgggtctgtgagaccagccgcttctcatcctgccaggccaactaaccaggtgactagcagagccactggggacacccccagccaggcccagaccccagccaattacccagggcctggagcaaggccctgtcagctcaacccccatcatctgacctggttcaaggcccatggccaccgagagccagtctgcagctgggcaaaagggcaggtgccggagccctcagggtcagcagctgtgtctagagctcgctggacaaaggctaggccaggcacacttcagaaagcacctgcctcccacccactctggtcggtcccccaccccagtcactatgtggcactgaggtctcatctcgggccccagtgccaggctcttggccagccctgtcaggatggggcagaaccctgggggtagggagggcctgtgactgggccaccacgctgcaagtacagcagtgagaatgaccgctaggaaaggacactggcggcaatagggggctctgcccagggctctctgcctgggctggggcaggccggctatcaggcagtcgcacccccagagcggcctcgtttgttacccccacaggcaggagttggataaatactcagcctcctccccgctccaggggagtcactggagggtgctcagcaggggcactaagccatcagcccttacaggtgcatccccttccctactccctgtcttcctgggtcacctcccaaagaaatgaacagcttccacatcaaccctggcctcattctgcttccagggagagtcagccaaaaacatcaggagacagccatggtgtagggagcatgaggaccgggacccaggcactggcacgccagcctgaggaccgggatccagacaccggcactccagcctgaggactgggacccaaatgccggcactccagcctgaggaccgggacccagacccagacgctggcactccagcctggacgcccgctcaccggcatgcgcacgggtgaatatggagggaggtgggggaactaggaaaggaagaggaggtcccctggagggaaaggcgtggaagctgaggcctggagggggcagatgggaggaatgttctgggcaaaggggcaagctcctggacctgttgttaccatggccaggactcccctcacccagctgacagcacagccccacagagcccccaggtgagggcctcatccccatcctcacacagtccccagggagggtcccccctcacagagtccccaggtgagggcctcatccccacagagtccccagggagggccccgcctcacagagcctcatgcctgcagacagggccaggtgaggtggacgtctcttgcacctacacatcctcgcgacaggaggatgcacgtcgtacagatggggaaacaggctgggaaagggagtgtgacctgcccgtgatcccagaggtgtggctaccagagctggaactaaaaccggagcccttcaccaaatccaggtgtgactcgaagtcctgagtgcacaaagatcacacgaggacagaggctcctgggcctgcacaaaccacagttccgggcaccccagctccagccggcccgcacgctccaccagggcctgtccccacacctgccctgggacagaggctctcaccccatgcagccacgcagagaaagaccacccccgattcgcacctgcagaggtgcccaggggggtcccgcctccccagggacagcgagtcacacctgccacctcccagggcagtcacaatgccagcccacaggagccgcaggagctttgccctcctaaagatcatgttgttggaagaccagagccttcgggggcttagttatgctctgagggtcctaaagccacgtgagggtagctaaggccaccacagtcccccactcggcgggggagggagggcaagaatgacattgaaggtggcaaacaaggaaaaacaaggaacggggtctctgccctctctctcgggggcccctgacctctctggggtctctggcctctcacggggtctctgctcttttgggggtcactggcctcagagttctctgccctctgaggagtctctgccctcctggggtctctgccctctccgggtctctgctctcttgggattgctgccctctgggggtctctgctgtctcggggtctctgccctctcgggggtctctgttctgggggtggtctcttctgtctcagtgccatgtccctgccttgcctttctcctctctggtcgtcctagctcccaggacctaagctggccttggatgaacccagtacggtgcctctcctgcctgtatcggggcatccgggcactgccagcgtcccattactggactctggtcaaggagcttggtgtggataacgggaagttttggaaacttcccacccttcccagagggcttaaagggactggggcgaacgcccaacccagccacagccgtccagggctttgtttctgacatgccttaaaaggggacagagtggccgccgaggggacggagcctgccgtgtcccgtgtgcagcggcggaccaccaggcagagcgccaaggggagtgtccggagatccagcatgggaagagccccctgccacttccagcaaggagcacacaggtgcatccgttctttctgccccacactttctagggacagcaggccgagcccatggtgtgcgccgtcagcatgggctctgcagcctccgacccatgtgcggcctgcccggaccctcgctcctccgtgtgcggctcgcctggaccctcgctcctttgggccgtcactctccctactttgtagacctggaatgccatccctgccccagctccactgcccatgggtggccatccagcagccacggtggagtacacgctgcactgtggtgcccaggggccctctatcacggcaggactccccaacgcgatgtccccggggttcactgccccagccctcagtggcctgcctctctaggcattgcactggcagaagaaaatgttctcgtccaagctcacagccaccaaggtcacaggctaccaaggtcatggccacccacaccgggcagctgacctccaggatcatcctcgggagatgcccgcctggccccacctggccgccctgccccatttgccccatcaccccacaccactgcactccagcctgggcgacagagcaagactccgtctcaaaaaaacaaaagaaaagaaaagagaaaaagaactctatgtcctcatttcaaatgcagggagagtctctcggtttaaaccgtaagtgcccttcccaactcggcagacccgccccagtgaagagcattttcatgacttgggaacaggacactcaccttgccactaggcaggactgtactcactggctcggggggcgcccaggcaggagacaaagcattttcccatggcatatggatggcttccgtgtgctgcatgactgggcagtgtgagaaaaacgcaacccccagtgactgctgtagaggacaattcagccaaaaatcaaactgccaccgtcatctgctgagaccttgatttcccagggcctggtggtgctgaaatactcagaacatcctgaatgaatgaatgtccacttccttcaccagctctgtgctggggagggggcagggcctgcgtctgatcaggagctcctcccccggggaccagcctggaaccccttatagcgatcaggagacacaggagacaccctgaatgacgacactgagctctttccaatctcttgcttgtcccagcgagtacagtgagcacatctttccctgtgctctgggcaaacccctgcggcagcagctcctaccgtgaaattggtgtttctgggtcacagggtttgtgcctttgtgattttgttgctattgccaaataccctctgcagaattgtgccaaggcacctccccaccagcctgagcatttgcagtgaaacgctttagcaatcctgacatttctgccagcatattccacagcatgctctctttgccacattaatcaacaggagctcagaggaaaacttgaacttcaggctgagccatttcctgcaatctgaaaaatgaacgtggccttcggacacagggtggtcccttgccagggactggatggaactggttcaattccccgctcctgggcttcctggtgtgcaacgtgagccatgctcaccccagggtggctgggaaaaaacgccggtccgctctgagcattcgtttcagtgatggctgttcttgttcacgtgagatgtgccaactctacaatactaaaccgttgggagaagcttcaaggggacagcacctggggaggggcagtggcgggctccaggttgcccaaggctgtcatggagaggaggagaccccagtccagcccagccttgtgcctgcagtggaggttccagttgtgaaggggctccaagtgccttgttcatcctttgcttgataatgaaccacctctgccaggtgccagctgtactgtgcacctgcagctccacaccctctaggcaccagcccctccactctttggcctcttcgacagggaaccccgaggggacagtggagcaggcctggggctgttccaggcagcaggggggcgcctgggtcagcgtccccacccgctgccctccccggccttccaacttgctgtgtgcacattaacaacatggacggtctttttcttttattataaaagtgattcattctcttgtgaagatttaaatatgaaagagtggatctccgctaatcccacccggtgatgatagcagccgacagatgggcgagcatagagctcagacattgccagcagcgtcagatccttatatatccagagcacggctcacacgccaccgccctgctggctctgtcagccgcatggtcctccgcgacacctggggctctccctccttcctttgtgtgcacaacctcaaagccattttttccagacttggcgtgaagatgattttctgacacgttgatgcttctgaagcacaaggagggccctgtctccacggtgtccaagcagaggctgacatcctttcaggagggaggtgattcgggcgcagctgggctggcgggaggcatggaggctgagtccccttcctcactgctctctacctggagaagaaaccaccagaccatgaggccgagctggggaaagttccggggggctgcttgggctctgtgctccctccactggggcaggcggagggccctgcgtgctccttccaggcaggggctgaggggactgtggaagccacgacaggggtctgtgtgaacagaagacccaaggacaaggtgccccagcactcccagccactagcaaggacaggcaattttcaaaacttctccccaaactacaacctcaggaaaaggggtggagaaaactcctttgacagagatttggttttcaccaccatgacaggacaatgatgatggatggaagctgtggctgggcgtgggaaggctgagtgtgcaaatgtgggtggagttctggggccccgcccccgccagtcttccacttggtccctgtgaggacccacatgagggaagtgttgcttctggcctcagaacccaaggcagagcaggctggagtcccaccccatggatcacgagcccacgctgtgaccctgagtcctggacatgcgcagagggagggtgtgcacgagcccgggagctcctgtctctgtcttaagagtggagcatgtcttaagagctggcatgaggatcagagggtcccttcagtgcggccttctagaagaactacagcaaccaggccctcgcaggggggagatgcacctgctggggctaaggagcgagtgaagccagcccctgagacacatgctcccaaccccatcctcacctcccaagagagggggagcctcctgttaagcatccaagtcccaagtcaccggccggcatcggctgcagctctctgtgtgtggagacatctcattctggtgtcttctttacacaggtcagcgctcacaggctcggctgtgtctcaagacccaattccttcgagtcactgagatgcccaaggacaagggcaacagagagtgtgaaaagctggagtagacaggacagaaaacagggtgcagcgtcccccaggttggcagatagcccagccccagggaccccacagccatggcaacctgtgtgaatgagccccaggagcagggcagtacacgatctgcgcgactgtgcggggcagccctgggtctctgcctcaggggagagattgtgtcctcgccttttgtggtttctagaggttcctgccctccttggctgcacggcatctcccagcctctctctcccttccgtcgtcccctctcctcctctgaccctgaccctcccagtccctcttagaggggctgtgattaaactgtgcccaccctgaccatccagaataatctcccatctcaaggtccttaacagcatgtggaactgcactagccgccccaaggcccccaaaaggcaaccctggattgggccccccaagttgcctgggattcatggccaccacccggctcgacggctccagaccgaaatgcacccagttatagaaacagacagttgcctcttgaatgtgcacatgtgtgaggagagtgtcacacccgtcgaattaaggtggacccgccatgagtgggggcaatgctggccaatgcccacctgcccagcacccacagctctcggcctggggctccctctgtctctggagcccgcactaaagtgtgcgtctccatccacgactggcagggcttggggcatagacatcccgctgccttgcctggaggcgccccaggcctccactcccacactgtctcagggctccccggggctcggctctccttgctcacagtggtccgggctggggttccttcttggttgcatttccagctgtgttctttccttcactttctcactctcccttgcctcagggtctgcatctgggggtccactggggaggactcagcctctcccgcgtcctccatcccacacacctgtccctgggcagccacggggaacaggagcacaggggacagcaggcagagggcagcgcccgggcgaaggggactttcgcccttgcttcatgcagccctggcacccgcagcagggtaagacgagatcccagaggaggagtcttggccgcagaactgcagggccaaggcaccagccgctcgggggcctggagagctcaggtcacaaacttgaagtcagctgcccaggaagcagcctcagctgggggtcacaggccaactgggcagtgcccttggccacacctgtggaaggaggacagaggagggcagggcggaggagggaggtgctgggctgcaatgtcacctctacagacctcggctgatcccaagggggtccacagtggatatggtccttcaggggtgcccttgaaggcaggaaggggacaggactttatactgttcctcccaccccttcgagcagtcaccaactgcagcccagatgaggtcaacaggtacagaaaggagggggtgggacaggaaggaggggcgggacaggaaggagggggcgggacaggaaggaggggcaggacaggaaggagagggtgggacaggaaggaggggcgggacaggaaggagggggcgggacaggaggaggagatgggaacagggaggtggaacgggaaggaggaaatgggacaggaaggaagagatgggagcaggaaggagataggactggaaggaggagatgggactggaaggaggaaatgggacaggaaggaggagatgaggcaggaaggaggagatgaggcaggaaggagatgaggcaggaaggaggagatgaggcaggaaggaggagatgaggcagaaaggaggagatgggacggaaaggaggggataggacagaaacgagggatcagggtcctattctaatctcctgggggcatgattgcagggggtgacatgattacttccagccagccctacatgagccacctcgtccatggagtcagccccgccagggcagcagagccctgggttcgcacagggagccagggtggcgtggggcctgcattgcagactccatttgtccacatcaatcacttctctacggcccaaatcacccttagttgcccagttcctgctccgcggcagtctggctcctgctggcgccccagccatctgtctgcattagagaatgatgcttgccagggcctcagggaggtggcacggatgggcaacactgtgctcccggaccaggtgacagacaccacctcatgccccatggcatggacctccacctgtctgatggctttgccccagcctatctgatggcatggtccctggccagtctatctaatggcgtggtccccagcatgtctgatggcgtggtccccagcctgcctgatggcgtggtccccagcctgtctgatggcatggtccccggcctgtctgatggcgtggtccccagtctgtctgatggcgtggtccccggcctgtctgatggcgtggtccccggcctgtctgatggcatggtccccggtctgtctgatggtgtggtccccagcctgtctgatggtgtggtccccggcctgtctgatggcttggtccctggtctatttgatggtgtggtccccagcctgtctgaaggtgtggtccccagcctgtctgatggcgtggtccccggcctgtctgatggcttggtccctggtctatttgatggtgtggtccccagcctatctgaaggtgtggtccccgacctatctatctgatggtttggtccccagcctgtctgatggcgtcgtccccggcttgtctgatggcatggtccccggcttgtctgatggcatggtccccagcctgtctgatggcatggtcctcagcctatctgatggtgtggttggtgtggtccccagcctatctatctgatggtgtggttccctggcctattcgatggtgtggtccccagcctgtctgatggggtggtcctctgttggctggtgtgatcctgcctcttgtctcacatcgtgaaccctggcctgcaggaggtgacccaaggctgatgactccttctccggggcccttgcaccacacagcctggccctgattacagcccctgggctcctgtacctgtcctcgcagcccccactctgccactttgcatttgtctgtttcactcaacacacatttaatgagcacctactgtgtgtaccaagcccagtggggaacagcacatcaatgaggctggtgcgggaggccttgggtaccctccgtctggctccccgccccagcgcatgaggctgcctctctgggtctcggacgcccacaccgcagtgtctgggagaaggcctggaagcctgcatttgggcagtggctctggggcccggccttgctggcttccggtggccccaggcaatgactcctccctgtctccatttacagatggggagaggagctgaggatggtgggcccgtgaccctgagtggccagttcattccccaggccctgactggtgcagcaagaaagagaatccgccttgggttgggggatgtggcatgaactttaagatccacccttttccaccctgggatcctggcccccgtcccgcatcccagccccagccaggacagcccctggccacaccttctcggcacatcaagagtcatgagaggcagcgtctgccaccaggaggcctcgtcccaccgggccacctggccagggcagctgcgacaggaggcagagctgaggccctgagccctcctctgcccattcccagctcaccctcagggttctagccctgtgtcgctgcccctctgatccaaaaacttgccacaggtcccctccctgccatgctgccctctgagtgacacccaccccctgcagcccccacagcccccaccttcccttcagaaagcaggagctgttggccccggggccccgcccacaggccacggtgtcagtggtggctgaagtccgccgtgctcaccaatcctctgcagtctcgcccctgcaacaacagcacttgaggaaggaactggccacgcagcctttcatgaggtgggaaactgaggctcaagggtgtctgtactttgaactggaccaccccgctgtgagaaggagcagggcagagactgggagcacccaccctcccgcaccctgtgtgctgacatgagctcatccctgctgctgcagggccagagagacagacggacagtttgacggtggtccctggaagggtcgacacaaatgaaaaaattttttaaattaatcttctttcctgcaaaagggaaaacagaccccttttctttcggcttttagttagaaagctcttcgttgtggattctttgaatgtgggtaaatctttttttttttttttcttttttttgtgatggagtcttgctctgtcgccaggctggattgcaatggcacgatcttggctcactgcaacctctgcctcccgggttcaagcgattctcctgcctcagccttctgagtagctgcgactacaggcgcccgccaccagcccagctaattttttgtattttagtagagacagtgtttcatcatgttggccaggatggtctcgaactccctacctcgtgatctgcccacctcagcctcccagtgttgggattacaggcatgagccaccatgcccagccaaatgtgggtaaatctttttaaaagctgaataagccccctgcctgggcacaagccagggatgtctttcccaggggcaggatgcaccatctttgaaacgtggacatcaaggaaggcggcacctgcctccccgctccctgcccaagcccaggagcccgactttggcgggcgcagtgcttcagaaccacctcccgtcgtagagacacgaggagtttgtttttcctttggataaagccaattagctggcacagatggtcaccccagtccccaggtggatgtgtggtggcgtctgtgtgacaaatggtgccgccaagccgtcccacgggaagacgagctcctgtttgtctttcaaggagagatgcacgtagcggactgcatccgcccggctgtgtgcaggctgagatttctctctgtctttgcaaactctcagcagcttgcacgtcgtgcacctggcatcctggtttgatgctcaatcaatggcaaaacgggtttctttcttttctgccttagtggagaggtctgggggttagcaagagattttgtttttaattgtatttctccaacaccccatgagatgctccaactccatgtgactaggaaggggcaagggaggaaacctgtggagtcccctgcacaggacgctgtctccgccctgctacgacgctgtctccgccctgctaccatgcttattcctggctgctgctttgctgttgactctcacaggcagatgaggtgtctgctcagagaagagcccaggtgccaccgagggaatgcaacgtgccacaccccaagacatgacacttgtgagaacagtgtggcccagcccccactccgggcacagcctcggacaccctgcccgcctccgcccatggaggtgcggcctgcaaagcgtacctgccgccgccttcccatccctcgggaaagccagcctcatgtccagtctaaggagaattctaagggatgctgccagccacctgcaggctccgggctgagctcaagggaggggccaagggcggctttaaaaggccttcactgatcacttgccaagaagcccaaaatagcttcccaatctaccagcctccatgtgcgccgtgaccgggacatgttctgagtcttgtcttttcattttttgtgtttttcaaaagtatacaacttataaataagagtataaagcctggcgtggtggttcacgcctgtaatcccaacactttaggaggccgaggcaggtggatcacgaggtcaggagttcaagaccagcatggccaagatggtgaaaccctctctaccaaaacacaaaaaaatagccgggagtgatggcgggagtctgtaatcccagctactcgggaggctgaggcagagaattgcttaaaccttggaggcggaggttgcagtgagccaagatcacgccactgcactccagcttgggtgacagagtgagattccgtctcaaaaaaagtataatttccagtaggtaacacgtgcacgtggagccacacacaggaggcaaaagcaaagtccacgtcctcccagccccaggcctcttcctcaaggcagccctgggaggcgtttacatgctcctagagggatgggacaacctggtccctcctctcccacctacggacaatttgtccctttgaatcaggagaattgggtctggtcagggaacctaaggctgtttcacactgacttattagaactaaattctaaattgaaaggaaaactctaactttccaggcctaagtaacaaaaggaccagaggctactccctttgcaaacccggcagatggaaaattaaaagtatctctgattggttgctttttgcaaccaattagatgtttgcataggagtgtaactttgttttttgtttgtttgtttgttttttggctttttgtttgttttcattttgttttgctttttgagatagagtctcgctctgttgcccttgctgaagtgcagtgggacagtctcagctcactgcaacctctgcctcctgggttcaagcaattctcattcctcagcctcctgagtagctgggattacaggtgcacgccaccacacccagctaatttttgtatttttagtagagactaaagcagggtttcaccgtgttggccatgctggtcttgaactcctgacctcaggtgatccgcctgcctgggcctcccgaagtgccgggattacaggcataagtcacagtgcctggccaggagtgtaactttgtaacttcacttcagcctctgattggttgctctctgcagccaatcagactggttgcagtcaccacttcatttacataaggtgagcaccaagtgccaatgggaaacctctagggggtatttggacccgagaagattctgtatccagggcccttgcacactcccgctcccacactgtggggcgtactttattttcaataaatccctgctttcgttgcttcattctttccttgctttgctgtgcattttgtccaattctttgtttaaatgccaagaacctggacaacttgcagtccagaccctccaccggtaacaccttctccctgcccagcaccggcgccgaggtctcttcatctcactgcagcacagagctctttccccatgagactcagcaccgcctcctgccgagagaggcagcttagtgtctgtgggaagcagaatgccagcatcccaatcccttcatgtgctaccatgacgtgtggcgggggaaggagacttggcagctgtggttaaggtgaaggtgggggacaatcctggattccccagtgagcccagcgtatgaacccttaaaagagagcgcattggccagcttctccctggaggccgagccataaggcaggaggcggaggcagagagagtcgaggtaaggacatgacctggttttgctctgaagatggaggatggagccgtgagccagagaacggagcagcctccagaagctgggagcagcctttggccaacagccagcaaggatgtgggacccaggtcctgcaactgtagggcctggattctgacaacagcttgtcagagcaggaagccagttcttcctggagcctcccagcaagaaccctgctggctgaaacctcaatttcagcctcatgagaccttgaacagaaaaaccagaagaacccgcgagaacctctgacctccagagcatgagatgaaaaatggacgttggtttacgctgctacatttgttataatttgtcccagcagcagtgggaaacacacagtatcccccttgcctgctctgctgatagaaaggtacattgttttcaaccttctgctatgaagaaagctttgcattaactctccttgctcatatgcacatggagtggaggacaaatctgctgtcaagccctgaattgggtttttgagacactgtccgtccaaacacccacagtgtgcccctgtgcagaggctatgcgtacacaaggccccaccatccacaggacgacagaggctggcttggccagcccaagaccatccggcccctcaggagctgcctgactccaggagctcgtaggccatgccccggctccccctgggcaggctgcctcctgggtctgagtggggaacaggaaggcctcagcctctcaggtcaacagaaagtttgtgctcagatgggctgaatgttccgggtccatttcctcctcaagcccagaagggtttgctttgcaggaacctgttccaagtgatttcgaagtactcaaaggctctttggtggatgtgtcaggatcccaattcctgaaataagaaagttgtgtcaaaaatcacaaaagacgctgggcgcggtggctcacatttgtaatcccagcactttgggagaccgaggtgggcagatcacttgagtttaggagttcaagaccagcctggccagtatggtgaaaccctgtctctattaaaaatacaacaattagctcggtgtggtggcaggtgtctgtaatcccagctacttgggaggctgaggcaggagaatcacttgaacccaggaggtggaggttgcagtgagccgagatcatcgcgcccctgcactccagcctgggcgacagagtgagactgcatctcaaaaataaataaaatcaaaaggaactggcctggcccaacatcctggccgctgcgtcctcctcgctgcaaagtcagattcctcgctcccgctgtggggtttcctggacccctgcccacagtctgctaagtgcctaacctggccactattggagcccccgatcccacagaggtggctgttcagagagaagcggtgggcccagtgttccccaggccacactccacaagtaggtgcaggaagaagagaggtgacacttggggctgctggggctcagcccctccagggccctcaagaggggtgtataagcctcccacccaggggtgacgagctgggtgctccccaccaacacccgctggcatcagcagcagctgatcctagggcatcacctgcccgaaagccaaggaagccccttgcagagggcagcgtatctggcagtggccactcgggtggggccgccttcctcaagctcccaacccagcaaggactcccttgcctcaggctctcccctgcctctctctcagccgcgtgagcacggctctgggcaccgcacctgcacccagcagaactgtgctaaccgggccagatctccaggggccaacacagcctggcctctaggacgggccacgctgcgagggagggaggcaagtgtggggaggccggattccacctgtttggtttttgattagggaatggcagaaacccaggcctcccggggcagggattcagctctcctaacggaggcagccttggtgggggatacttttcagcagggactcttttatcccagagtgtttttgctgtgtgcgcgatgactggctcagtttttgtaataatcgtttccatcagcatagagacagctgtttatattcttcaactttgtattatgaaaaacgtcagacagaaaagtcgagagactagtatcgcatgcacctgtgtgcacagcatccagattcaacagttacgaagggaaaattccacattttattttaaatttactaaagactgaaacacaccaagtaccgcaggaaggataacctgggtggaggagggatggggctggagagtcggggcacaagggtgaggggaatggggtgggtgggacagaggtgggggatggagggtggggtagcatggggtggagtgggggatggaaggtgggatggggctgggtgggaccgggtggggagatggagggtggggtgaggcagaggtgggggaattgatgggcgggtggaggtgggtgagggtagggtgggatgggtgagacatgggagggatggagcatggggtgaggcagaggtgaggggatgaagggcggggtgggccaggggcagcccccagtgcccacagctggagcaggcgaggggcaggagggagcggctgcctgcccctgcgctgggtgggccctggggcgccccctggcctgctgccaggtctcctgaaggaggggtttgttcccgcctcccgagcccacagtctggtctgtgtgtgcctgtgtctgttgacaactccatgagtgaactgtgatacgtcaaggcttgggggaagtgtgggaaatgcttgtgattttctttctctgtagaagtggagcagagagaaagcagctcccacagcgtgagcgcctgatacagaggagacccggggcttggaggccttaggcattcactccaaagacctgagaattaagggaacgcggcggggcctcttgcccagacctggaagaacagcaagtgctgcgagggcctctgcaccccctgaggacccctacgccccccgaggacccctgtgccctgtgagggcccctgcacccctgggcctgggtggagacccacacacaaccccactattccaggggaagagaaaggggccctgtggggcttgtcaaccatcacagacccagagactctgggcagaagcttctgcctgtcacgctcagcctgcgacggccccaccaggagagcgcagccgtgagtcccagaggaagcggcttaaaaggcccctttccaccagccgccaagcccctccaggctttgctgaggccctgaggtagccaagcaaaaaccagcctcacttcccaggagctcaatcaccagaaacttcagggaaacaaaaacccaccggaagacgttttccctaattacccagacaagtcagacaaaggccatgtagagcctttcccggagtttcccagcaagcaccgcagcatctgggttctcacgtggccgtcaagcctgtgcacctccacacggagctcgggacccacccccagggctcctggagtcagctcagcctccgccagcaggcaggccccagtgcccacaggcatttctgggcttgcagggcacagagcctgatgctttgctccagctcccagcgaataggagaggagcccacgtggctgcagcgtgggcagaggcacaagccccccaccctgctgggagcccaggtggcccaggagtgctcctagcctggtcagctgcccacgcctctggcttgcactgtctgaggccctgagagggaagcctagcctccagctgcttagccccaagaggaaggtagggctcacaggctggatggggggtcagacgcagcaaggacaagaggccacttgactgtagccagcacctgcctgtgtcccaaggctgcagtgtgtccaggagggcccaacaatacccatctgtcttgccttggccgccgccacagccagcctgaccacccagacctgagagatttgctcaccaggacactcaacacagcaggccgcagagctgcccaagagccttaaatctgctcccaccttttcattcttgatctcggtgtagacgtgctctggaagatgatccatttggggcatcgacactccttcctctcgccactgtttttcttagttactgcattattttcagatggccggtggatacttcatacctgtaagcaatgcactggagctgtgcttcttggctggtgacttctgactactcccacggagggaaagcctgggtcccctcccacccgcattcccaccctcatcttttccttatgtccccttcacgttgttaagatcttggacatttgccttcgttcaatcatacatttgagacctcctttttcgtctataggatgattctaactaggttatatggtttggctgtgtccccacccaaatctcatcttgaattgtatctcccataatcctcacgtgtcatgggagggacccagggggaggtcactgaatcacgggagcggttacccaggttgctgtccttgtgacagtgagtgagctctcacaagatctgatggttttataaggggttgtcccccttttgctgggcacttctccttcctgccaccgcgtgaagaaggacgtgtttgcttccccttctgccatgattgtaagtttcctgaggcctcttcagccctgtggaactgtgagtcacttaaacctctttcctttataaatcacccagtctcagttatatctttatcagcagtgtgagaacagactaatacaccaggccatcctgataaacagcacttaagtattatgacgatttaaatatcatcttttgagaagccaagtgctacgtttgtgtccaagggcaggaaatacaatgccattctaaacccttccgtgtaaaccagactctgcggagcactggctctctgtgccctgtttgtttccactctcagctttcaccttttctccatgtccttgcgtccccgtggcctcctccttcccagctgctgtggctcaggtgcttcaggtgcactgagcaccccaggtcttggcagacacgttgtcctcacatgagaagatgtgggctgcaattgaggttcttggttccttgtgaactttgtcttcaagcatccagcgtcattgatccaagcagctgtcactctggctctgagtcctatgggcactcagttcctctccagaagctctcaggccttccctccttccctccagattctgaaatgttgccagaaggggaagcaacaccctttgcctcaagcccgcttggtactcgggagcctggctcacatctctctgttcccttccatgttgtcctcatggagctgcagttgacacccactgggttggcccttgaaaccctagcatctccctcctaacagtcaacagaaaacgcatccaaagcccaggtgctgcagagcccaggttaggggacatgctggggcagagggacttacttcagaaggacttttcttgcctatgaaaagaattgctccttttacaaagaggacattggctgttttctgtgttgacccaaagaataatttccctttgttgcacaaaaaaaaaaaagcagagctggactttagaagctgaatgaatggggaaagtttccatctttttaaaaaataaattctgccccttgtgaacccacaggaacccgactggagagctgaaacctctgggaagccaggccagcctccgtggcatttttcaagtgtaatgtctccatcctgggtgtttttaaagtcgtgattgtcccagggttttgagggatccgcggagatgagaatagcggtgtgaaatgatgcgtgacactcaccacagacggccatgtcagagccttgtctggaacatgcaagcagaggctggcttcatggaccacagatggccgtgtcagagccttatctggaacatgcaagcagaggctggctccatgggcagaggcgctgctggcgccaggctccccgtcagcctgggcaggaagctccacggccaacatcagtgagactccagcctcttgggatcaagggcccaggccggctaggaacctgagaagccttgtccttgctgccggacgtcatcgcctctgagagctggtctcttgctctaggcagggtccctggggtgaccccccagcctgcaccccaactgtctaccaccctcagctatctgacacctctcctgaagaagatgattcctgccatgcctgcagaaaactcccagggggccacgggaaggggagcaagatggacaagactggcccttcccaggcaggagaaaggacagctgcccctcaaacccaccattcagggaaggtgaggccaggtgatgggccctggggtagcgcgggctcagcacatgcctggttccgcctggttcctccacctgatgtaggaaacacattacccagtgctcctgcgcctcagtttccccatctgcaatggaggtagcagtggctctaccgggaggttactatgatgcataagtgatgttgcgccgtgaagagctggcacagcacgggcagagagtgaccaggaacacgctcccacatcccgacagcttggtccttgttgtctgggctccggctgaacaggtcaggacgaaggtgcggccccttggctctcgaagtcaccatttgccggctggacaaaggtccttccagctcagcctgtttttttgtttgtttgtttgttttagacaaggtctcactcatgttgcctaggctggagtgcagcggtacaatcacagctcactgcagcctcgacttcccagggtcaagccatcctcccttctcagcttcctgagtagctgtgactacaagtgtgtgccaccacactcaggaaattttttttttttttttttggtagagatggagggctccctaggttgtccaggctgacatcaaactgctggactcaagcagtcttcccacctcgggcttccagagtgctgggattactgtccctggctgagcttggttcttggtgacaatggggcggtgactgagaactcaaaggaccacacaccccatggcaggcaggaaacatgaggctcctctcccccagcagattggaaaaagacaatgagaagcagctcagcccgcaccccccagcccatgtgagccaacttaaaaacagctcgagtggcaattgcgtggcctctcccactgtggtgctcgcacccaccagccctggagaagtgctgggccccgccccaaagcgtctgatgccgcagagctgtgtgttgggtgtgctgcccatgtgcacgtgtacacgagtgtgtgtgtgtatatatgtgtcatacacatgcatgtgtgtgcacctgggtgtgcatgtgtgtgtccatgtacgtgtgttgtgtacatgtgtgcacgtgtgtgtgcatgtgtcgtacctgtgttgtacatgtgttgtaccatggcaggcagtacaggtgtgtgtgtatatgtatacacacatgtgcacatgtgggaagaatacctatttctgacaagtctccgggtgaggctgagtctgccgttgcagggcccgcattctgagcaccctgggtctatcagaactcaagccctcctcctcctcctactgtcccatcccacagaggataagaggtgtgcatgtggacgggggttccaggacagcatggcttctcacagcagaaacacgcagcagaatctgtccatcaaggcaggcgtggtgaaatcagttaggcacccttacctaggaatcctctgcgcccacaaaagcagtacctggagagccaggtcctgggtctcccctgggctatcatggcctgcctctctccctccctctacagaccctaaggagcacccggcagggagagcaccgcccaccctgcccctcagtcatgcagctcacatcgggcagaggtgacgctgtggacctgggtgggccccacgtttcaagtcaaatcaagctgctgaccaggaggtaattcaggcaaaaggagcagaatcatcagataaaaggtaggatgcccagttatatttgaatttcagataattcaaatttgattcaaatttgataattaaaatgtgaatgattttatagtataagtatgtcccgaatatatacatggattatattacattatgctatgttatatcatattattttattaggaaggtggtgaccactgctaaccagaaggtgcctgtctcccagcctcatgggaacacgtggttcttggtcatgagagctgggtacagtggaagggatgtttagaaggctttggtcaaacatatatatatatatatatatatatatatatatatatatatttggggcatacttacactacaaaattattcaatgtttttctgaaattcaaatttacctgggcatcctgtatttttatgttaaatctggcaacccctgaaaagagccaaaaccccctcaggcggtcgagagtgcggcagccaagccagcacgctgcagctccctccttctcggggccgtggcctggccctgcaggggacatcgtgggaacaataattgtccaagtctagtgctgggggcatcatgggcgctgccccagagccacaaccagcccgcctttcagtcagcatggtgagtcttccgatgccccatgtgaagaattgaacttcttttctgaaagctgagagtggccccctcgtggtgggcaggttcccagggaacggaaacgccttcccttggttccctccagcagagttcagacaggagccaagatctgggtccaaacagtgggtggaaaacgccccctagaggtgtgatgtgttggctgcaagcctggtggctgggcctggggacaccctcaccaggttgccttcaatggggggttcccctgaagcccaacttttaattttctgcaaccacaggctactttggtcagaagggaaataattagatcagaaccttaatagcgttaatttcccccaaataggaagaaagcaaagggaggggacatgagagctgttaattaggtgacgacctctcctacctgctgtgttggaaaagcggctctatggaagacatagcatccagggcaggaagaggcaggctcggtggtgttgggttggaaagcccccgcctcgtccggcggccatgcagtccccagcacctctgagtccactcagcccagggaagaggacaacagagctgtgctcagtgtccagctgtctggatgaggcccagggagatggcctgtggtggagcaggaggacctggggaaacaaaacccacagtggctgcccagctgcaaaggctgcgttctttctacagtgtctggggtctcaggtatgagtggcagagggagcagtcccatcagccatgtcagcctcgttgcaatggaattccacttctgtcccagacactcagccagacaggaggaaactgtgaccacaggcatgtggacacgcaagggtatgtttgagcaaagccttctaaacatcccttccattgcacccgactctcatgaccaagaaccaggtgtccccatggggctgggagatgggcaccctctggttagcagtggtcacccccttccagagatgacatcagctccccaggcaagaaactccacttagaacccagagccgatctgaggaatgattcatgcagctagacttatacaagactgatctataagctggaaggcttgtatgttcactgaccatgggaaagcctttccagggcctgagcgtttcccacttgggatccaagtcctctgttcctgggatcaagatatttgggaagccacatccatcttttgaaggaaatttgagcaacagggatcaaagagtgaggatcattcattccatccccgtaagggagggaatgggtcagtaggttgtgtagccagtccacaaatggtcactgtccacctgctgtgtgttggccttgcctgagaggtgggggacagtggtgccacgccattcccagccctggccccctggagccagctgatagcctggcaggggaggcacacgttgaacaaattatcatccgtgattcacaatgacaagtgtgcaaagtgtatcccacaaagcacttattgagtgagaaacacaggtgtgtggccacagagaccaaatgggaccctcacagctggggcggtgaccttggagctgagagtgaaggctgcgcaggagagagacaggcaaaggggtgggggcaggcatttgcaccccagggggctgcagggtgatttgcaaggggagcccaggtgagggtccacagggactagagcaggccaagaagggaggttggtcaggggtcggctggagccaggcttctgagggttgattcccggctctgccctcaacccaggcagttccccactctactcatctctgactcctcccctcaaagcaggcgtgacagcggcacctgcctcagaaaggagggggcgtgtggggaaagcaggtatttcatgacgaccgcccagcatagagccctggagacagtacccctgcccaggttcccactggagcaggcagacagccccggctgggatgagccaagcgtgtgtctccatgtggacccggcccaatgtggggctcagcaccctcgggtctcctggtccgggctcctgtctcacgcttttatgccatcttttctcaataggcacaggggacccccaagggaggaggcgctccagactgaaggaggagagtacctggcagggacgggtggagaggcgcagggaccccaaggtgtccagggaacagtaaggagatgagtaacggtgagggtcccgtctcccgagcgtatctgtgctaaggggctgtgggctgggcttcattcctctttagagcaaggctgaggccagggccacctaggggccagggtagaagacgtaccacgtgacagcagtggcctagacccctcacgaagtctcactgggccatatctccaccagggcatggcagggaccggtatcaccagcggccccctgcacagatggggaagctgaggcccaggtcccagtcagccaagccagctcttggaccactcagcggtcccagcaggtgaggctgaccagagcctgcctgggctaagaggctgcgttcaccagtgccagctgtggttggtcaccaggatgcctgagcgcgctggcacaggcccagggcaccctgcagagcaaccaaccctcaccgagatccccagggaaggggctgttgttggcccattgtacggaggagggcactgaaccctcaagaggctcagggcctcgcccggtcacacagctggaaggcgccagagccaggaaagggacccggaagcccgacccggagcctacacccgcagaggcgaaaacatctgcgtagcggctccctggccagtgggccgtggtgggcgtggccgagagggaatggggcggagagaagcccgtgagggcagggcggaggcggaggcggaggcagaggcggagcgggcggagccggaggccgcggcggccttgattggaggccgccttaagctcgtcatggatgcgttttgacctggcggccccgcccctgacccgcccccgagccgccctcccgagcgcttccccgcccggccccagcctaggccccgccctgatctcgccccctcttcaccgtccggccccggccccgccccgcggtggggcctccgcagcgacccgcggttaacgcttccccagagcttgggctgcgcggcggccgggagtcggaggcaggcggtcaaggccggcagggccggaccccctacttgccctttctcccagcaggcgctggactctgggggcgggcgtgagcccctccgtcccgcacccagacccgggcagcgagccctatgcctgcagtaattgtggggtttctggttttgttttttccttaacatctttattgagaccgttaagttcacccgcttaaagcgcacgattcggtggggttttgttgcgagcaaccgtggccactatctaattccagagcatttcacctccttaaaatgaagctgggcccggccgggcgcggtggctcaagcctgtaatcccagcactttgagaggccgaggaggaaggatcacctgaggtcaagagttcgagaccagcctggccaacatagtgaaaccgcgtctctactaaaaatacaaaaattagccggccgtggtgagcgcctgtagtcccagctacccgggagtctgaggcagtagaatcgcttgaacccaagaggcagaggttgcagtgaggcgagatcgtgccattgcaccccagcccgggcaacagagcgagactctgcctcaaaaacaaacaaaaaagaagccggtccccatccgcagtgactcgcgtttccctccccctcccccgtccccggcaaccgtgcatctactttctattcctatggagttgccagttctggctcttcctgtgaatggattcccatgctgtgtattttcgtgtctgaattctctgactttcgtctcagcccgcacccacgctgccgcagtccgcgctcgctgcttttaggctgaacgcggctgcgccgtgcgggtgcccgcgctccgggcgcccctcgcaggttcagccccgggttgggggcggcgcttgcctcgcggctgcgggtcccagcctgaacctgtgtcttgttccactgccgcgggcgcccgccacggagctgctgcttcctagggagacggttccatcgttgaaggaacggccagactgtctttcgcagcagcggcccatctgaccgcacagcacgaccgcacgagggtcccgagccctgaccctcgcagcactcgtcaccccggccgcgtggttgtggcggtctcggcggggcagggggtccccacgcgggctgattctagtttcgcgtgaccgatggtgctcattagccatatctgtacatctttttttttttttcgagtcggagtttcgctcttgttgcccaggctggattgcaatggcgcgatctcggctcactgcctcccgggttcaagcgattctcctgcctcagcctcccgagtaactgggattacaggcgcccgccactacgcccggctactttttttgtatttttagtagagacggggttatacgatgttggccaggcttgtctcgaactcctgacctcaggtgatccgcccgcctcggccccccaaagtgctgggattacaggcgtgagccaccgcgcccggcccatctgtacatcttctttggaaaaatgtgtatccaaatccttagccgttttatagttagattgtctttttattatcgagttataagaattatttataccttctacaaggaagttcattatcagatataggatttgcaaatattttctctcatctgtgggtcgtcttttcacttttctgatggtttcctttgaagcacagacttttttgtttgggtgcagtgtatttcttactgtgctttaaagaggaacacgttttaagaacccccgcgcggggcggagcagggcggagtccccggcgggaagggacccgagacctcggctgcgcctgcgccgacgccggcgcgtgagcccgagcgcgtacccggcggagcgcgcgcccgcccccgagtgcgcctgcgcggagctcgtggccgcgcctgctcccgccgggggctccttgctcggccgggccgcggccatgggagaggccgaggtgggcggcgggggcgccgcaggcgacaagggcccgggggaggcggccaccagcccggcggaggagacagtggtgtggagccccgaggtggaggtgtgcctcttccacgccatgctgggccacaagcccgtcggtgagcgcccaggctgcggacgcgcgtgggggcggggcgggcaaccggcggggcggggcggggcctgcgctcgcgacaccctcgcccccacgctccccgccgagcccgggccgtgacaccgccgccacacccgtcccgggacccccgccccctcccacgcgcccttcggaccccgccccggaccccgcccacgacccctacccccgtgagaccgcgaggtcccagcccgcagtgccccacccccacccccgccccgggacagcccaccccctcccacacacaccacccagccctgcccccccacagcccctccacaccctggccctccccatctctccgcagccacccttgcccctccagtccccagggcagcccgtcccctccatcccctttctcctcaccgctcaccggttatcccgccgcccctcctcccctcaggtgtgaaccgacacttccacatgatttgtattcgggacaagttcagccagaacatcgggcggcaggtcccatccaaggtcatctgggaccatctgagcaccatgtacgacatgcaggcgctggtgagcccaaccgccctccctgtgccgcccgatgggggcacgaacccgcacaccgctctctgagagtcagcctgagctgggcagaggcccctccatgtctgctggggtctgctgggcagagtagaggcccctccatgcctgctggggtctgcagtgagctctcagggtcagcctgagctgggcagaggcccctccgtgcctgctggggtcccctgggcagagacccctgcagtgaggctcgtccttaaggaggacatcccggggctccagagcctgtcatggaaagcacaaacacagtgctagcagctggctagcttttcaggggctctgctttagactgggtgctgggccagagtctccagctgagaccctggggagggagggaaggatgcagagtcccgggcccttaggccattgtcagcctcctgggaggcccccgaagtgctttaggcagagggtgaccctatctgagtcacaccaaggtgaatttggtgacttctgtgggagtcagacaagtagagttccagtcctcgcagagcttggagctggcactgtgtgacgggcgagcgggttaactaggtaagcagggtggccagaagagacaggtgggtgttccaggccctgtggcagcaggaggtggtgggtccaggagctcaaagaaggtggtgtacttggagagtggggtgggggtcaggggtcaggtgaccaggaggagtggggacctgtgctggtggagagtctgtgccagccacgttggactcagggccacaccggccatcagtatgacataggtctctccctctggtctgtgcgacctcaggagggcagtgcctggcaagcactctcttcttctttgcctggttctgtgcctgtggcgctcccaaccgacaccctcggtgtccatgggctcctgccacgtggatgagaactcgaggtgcctgcggcctttccccagggctgtcactgtgccctctgcatgccgccttggggaacgcagtctcatggtgagactgcaggccgtgctgggcaggcggagcccacaggtgtgtgtcaccagggctgcccggtcctcagggcccgccttagtgatgctggccccggtgggtcttcctgactcctgcatctgctgccgctggttctgccctccctgggtctgtctggaaagcccagctgtggcaggcgctgttcacaaaaagaagaaatgccctttgcccttgccccgcccgccgcagcctccaacacagtgatgtgtgctcattggcctctccccaagtggctcttacacggctctagtgacttcttgaaactgcatcttcacccttgtttcttaaacaaaactctctatttgatatcagcatgagtctgagattcttccattcccgaatccagagaggaacttcgtccttccagaagagatcattcaggaggtccgagaaggtgaggctcgggaaaggttgggcttgggattcagaaaaggccagaccctggccaagggcagggaggtgagggtgaggaccccgggcctccagggaggtgtgagggtccagcgcagaccccgccctacctgtgcttgggtggtcttggaacctccgggattggagaggactttgtttgagagcagtggctggacggaagctgaggcctgtgtgggcagcaagcgtcggagcagtccctggcctgaccatcccccagcgtcggccaccaccgtgggttttcggtgagcgtcagctgtctcctccacaggaaaagtgatgatagaagaggagatgaaagaggagatgaaggaagacgtggacccccacaatggggctgacgatggtgagtgtggagctcaccctgccctgatgccctttggggctcagcaccccaagactgccttcaggcagggcacagtcaggtgggcgtagagcctgcggtgcagaggccccaggcaggtcatctaggcacaggatggatcctgcagtgccccctccccaggagctgagtgcctgctccatgttgtaggccagggtctgagcggcggtccctgcagtgcccgccgcaggcaggtcctcaggaggaccaggcccctctgtgggcccaaatgcaaggggctcccagctcaggaggaagctttgggttcagagggtcacgtgtcagtatgcagatttttttaactgaacaggaagacaaaaataagattctggatattctgttttcagccaagtgatttttcgtttctcagttttttcatcttcagggagtttggggaaagcatcagaaaaatccagcaaagacaaagagaagaactcctcagacttggggtgcaaagaaggcgcagacaagcggaagcgcagccgggtcaccgacaaagtcctgaccgcaaacagcaacccttccagtcccagtgctgccaagcggcgccgcacgtagaccctcagccctggtggcggcagagaagcgggcgaggcactgtggtcgctgagggggttggctgggtctgagtgccaccccccaggccacagtgataccatcccagtgccatgagcccacactgcccgccctcaggctctcaggtgaacgtggccgtcagcggggaaacgtgtgtgtcagttggaccatgtgggaccctgatggacctgaaagaccaggatcggtccagctcagatattgagggctctgaagcctagttctgtcttctctggagcagctgtggcttccccgtggctgcttggtgacatggattagcgctacgtgggctgcagcatttgggatccaggctacctagaggggcatcgggccagggaaaacctcggattagcaagcaataaaaacatgacctcactcttcctcaaaggagcccctggtcttccctgtgtgactcagttctttccatctgtttgtcccgctgcaagcctctttctgcgctgactgtgacattggaacgtggccttcctgtcaccccctccgtgccacgcactgaaggccacccccacccacctgggaaactaagaactggatattttgcctcattcacttgtactgtaacaatgtatataatttggttggtatttcactatttaatttttaagaagcctattttactagtgttttatatgaacaaagtactgcagaagttaaacctgtgttgtattttttctgagatgttttgctttaagagatactttttgctcagtttttatatgccagatacagagaatttgtagcggttatttttgtatgatctagtaacttgcaaacagaccaaatggatgagaggcggggaccgtgcagctgtcggctgatgaggaggcggccgccccagtgctgatggagatgccactttcgtgtgactgcgaacattaaagcacaaaaaaatccaacctggagttgtgtgattttgataccaaagtaagttcacttttcctccaaaaggaagtttttatttttccaagatttataactaaagcatacacttagatgacttattaacattcacttgatacaacatataaacaaaatagtaacagattctgagtggttattttgtggactgtgacaagcacttcaaatacaaaatgttaggagggcaaaacggtgcgggccctcgtaggtcaggcaggcaccagtgggctccttcctgctgaaagctgcggctgtgagatgagaccgctggctgggtcacagagtgaaatccagcgttccgtgtgcggacgaggagacaagctgtcctggccagccatcgcaccccaatgtcttcagcttgacgttgcttctctgccagtggagcctcctccaccacctgggaacatccctggccatctgtccctgaagtcctcctcaccatgacgcagatcacaaggcacccactaaaggggcaaagccaggaatcccgtgccatgtgatcgccccgtgtggcacctgccactcgtctgcaccaaacgcactgccagttctggggaagaacagcccagggaagctgctggtctacggcctgcctgagctgtattccaagggtagagcagctgcctggggggaccctgtgggtcccttttctatagagccgggacaaatccacagccctgcagtaacagcctgccacaaagagcaggcatctggagggccccacacacatagaccaaaggactgagcccgcctggcattcctccactcacagcacaaatactcagccctgcagccagggaagggtggggtctccctttgctgcccaagtgtgcccccttgcccgtctgatctctcctgttaggtcagcctcattcagggctttgtgccaggtcctgtcctggagtctcagtccgggacagcagcctggctcttaggcagtccagaagcagcagggcaaaggggggcaaatactaacacggggtgtcacgggatggccaggaggagtcctgctcgccacccaggctcactgtcctaaacctccatctgaaaccgcatctcgggtgacctcagattgtgctaggaaagcctagttaataaatctgcctcatctcgattactgtaacattttgctgcacttccaggagaaagctagagcccacaggttaagcccactgggcaggtgagcagcgtgcccccgccccgggcctcccttctggaccagaggctgactggttgaagtcaggagccacgcagcccttatggactcacaggggcttctgggcttccctgtggggaggcccagttcatgctctgctggcaggtgggatgaccaggtcaaattcacaagtgtcagggcaagggcgatgtggcctcaagtcctggtaagcgctgtacttaccctctcctggccccaggggtcctgtctgtaacctgggggctttatgtaatgcacactccaccatgtcatgtagaaggtgccgactgaaccccaatctgaaaaggaaaacagctggcatgaggctggcccgtgcacggacgctcacgcgcctgctgctgtagaggcgagacgtggtacactgtgcactcgggacaagatctgaacgggtcagaagccgccgctgatgttgagcctggaagcctcagcagcggctctacacctggaacacgcagggcccaagagcacctgctgccgcagagacattttctctatggctggcagctgcgggtggggactcagtgaaggctgagagtgggagtgatctgaactcccccgcctgcccacccagggcgacccaggggtgactgggaaaggcaattgggctccactgctccccaaatagcagcgaataaatactgagcggcagggcactggcagcgaggctccctgcttggctggttgattgaggacagggcatgcttgggccaaatcaggaggctgccactggtcttgcctggagaagatatgaaggctgtaatccaagctcccagccacacaaaattctgctgggctccttagctgtgagcattgcctgctccaggcacatcacccactgcgtgtgcagagaccattgcccttcctgggtgcctgggagctgtgtgtgtgtgtgtgtgtgtgtgtgtgtgtgtgtgtgtgtgtgtgtgagtatgtgacagagaaagagagcccctttccccagcctcaacagcaaacccttctggaatgccgtgccacacggggcgtcactggactgcagaggatgctctgaagaagcaattctgttgcacagtcccctgcagcagctcctgcacttcttggattagcacgcccccgagatgagctctgcacacacacacacacacacacaacacaaaagcaactaaagaagcaatttggtgtggtgatatttgtaaaacagaagttgggcaatgtctctaatactctttttagggaagtggttctatagtcctgccgacagtaggtagcagcgggaatgctgtccccgtagaacaatgttgtcagcacccagtatgcttgtctttctgttttctggggcagtggagggggcagcctgaccacccaagtctcagatcacccaaaccctatacaaccacccagcacccatcaatgtccccatcagagccccccgactccacctcacagtctattctgatgctgcaaccagatcccacctgtaaatcatctaacaaggaggtcaggcagctcactcaggctccctgggaaacctgccctggccactgcactaagttgatttacagaaatgtccagcgccccagaacttcggggcatcaccactgtcgtttcaagaaagtgtgatgcatgtccacaggttccagccaggtgagactgcacctgctaacagtggtcaacaggtcagcaaagattagggcccagcacccagagggtccttaacctgtacttgtggccaggattggaagacttgcgttcacggctgtccctggcacacagtacaaggaatgtcaccagttcccaggcccagcaggcctgcagggctaggagatggcagtgtcccctaggggctgggctggggccttctccacctttccaccaccatcattacagggacaactctgcgaggagctatcctcatggccaagtccaaaatccagatttagttttacctaaatgttttgaaatgaattggtatagcagttacagaagaaatttatctggagtggccactcctgatttttatttcaagaggtcaccaaccttgccatgtatctgccagcagatgtcaaaggtggatgagcaagggacccgcggtgctgggaaatggcaggtgaaagtgactttgtgttgccccatatctgccagtgcttagagagagggccctgaggaggcgctgaactggcatcagctgtgttgaacagtccccagggtgaccctcccggtggcccaggcttcgtgtggtcctctcccctaagtgccttcttacaactgagagatggcggcaaaggtgaaggaagccacggcttgcccatgtcatcctggttatataagactcggcaccctagagagaaagactcccctggtggctttgaaaagaaaacggccgtgctttgcactgcctatggagggacaggggtccgccagcagcttccaggagctgagtaaggcccccagcccgcagcagaaggacagagacccctacacacccagcttagggagagaggcccctgtggacacgtggcccctccgggggttatcctccaagggacattcttctgatggggacatcctctggggggatttctcttgggggacagaaatattcctggaagaggggattctctgcggggcaggcatcctccggggagagaatcctgctgggaggacatcgtcgggaagacatccttcctaggtacccggctcatcttccggggagaccgtcctctggggggcgggcaggctttggggacattttcgggagggaggatctcctagggcgggcatccttgcgagacggggtggggcgaatcctcccgggtgggcatcgtggggtgggggtgggcgttccgcgaggggcatcctcccgggcggacgttgggggattctcgggggagggaggggcgcggggcgggcgtcccggggagggaggggcgttgcgcgcggacgcgggcggggcctgggccgctccgtcccctccccccgcccgccccccgcgcttcctctgctttcggtttcgcttccgcctccagcgcgagccccgccgccgccgagcatggacgaccccgactgcgactccacctgggaggaggacgaggaggatgcggaggacgcggaggacgaggactgcgaggacggcgaggccgccggcgcgagggacgcggacgcaggggacgaggacgaggagtcggaggagccgcgggcggcgcggcccagctcgttccaggtgcggccccgcggcgcggaagaggcctggggtccccggcgccccccgcccggctgcgtggacgggagacccccccatcccgggcggagacacctggagcctcctggagctcccgcagccccggggacccccccccagaccggccgacccccagccccagggcccggcggggaagtgcgggggccgcgcgtgggtgacagcggagctgagcctcccgggccccatcgtgtgtgggcgccgttccccccgggggtgcctcgggcgcgtcccgcccccagccgccgtggccgcccctgatggaacccctcccgcctcgggcccgcgcctcggcctcctggcggcccctgcgcaggccccgcggcctggggctggggctggggctggggctggggctggggcccgggccgggtctggcctgggaggcttcgcgtctgcacctgcgggagcccggggcgggccgacggggcctccgcttgttacttttgttaccgccgggcgcctgtcatcgccggggttacttttgttgccgcgctgggaacgccacactgtcgcagtccggcccccctgtcggggagctgggattgatctgggagcggccttccagctgagctgcccgggttgcggagggccgggaagtgcatggaactcgacggctccgcatggattctccccttggcacccagcactgtttgcgtttgcgcctggccatggtggagcgggcagtgagagagcacggaggggctccgccctgtcgccgggagggcagcggccaggcaggctgggcaggggggtggggtctggctctgtcccacaggacggtgtgacccctgggtgggctcttgacgggctttcctcactggagttcctcaggccgctctcctgaagcggtgctcagaggccctgaccatcctgccaggcgcccgtgacccctgacctcttccctctgcctcctgctgtggcttctgtccacaagcccctccccttcccctttggacccctcaggcctccccagctgcctgcgctggaccctggcggggctgtttcactttttcctgggcagtgtcatgtatgcacctgtgggctgactgtgtggccacatccagtcaggacccagcctccagaactgacccagggaggctcccgctggccccaggaaggagaagtagaaactgatgatcaggcggggcgagagaaccacaccagcggccctgttgagaaatcaggccgagaggtcggtggcggtggctcaggcctgtaatcccagcactttcggaggcctgggcagtcggatcaccagaggtcaggagtccaagattagcctggccaacatggtgaaactgttgtctctactaaaaatacaacattagccaggcgtgatgggcacctgtaatcccagttcctccagagattgaagcaggagaatcgcttaaacctgggaggtggaggttgcagtgagtggagattgcctgggaggtggaggttgcagtgagtggagattgcctgggaggtggagattgcatgaagctccatctcgaggggaaaaaaataagaaagaaaaatcaggcagagaggcaacgccaggtcccagctggagctcagcggggagccaggggatacagtggctgaccgggcctcctaaccccccttctagcactcccccaggatcctgggtcccaattgttgccctggacaaatacgcccattcctgccctacccaccgagtgaggctcagccccaggccccccaccctcatcacaaggtcagggctgtgtcccaccatcctcatcactaggtacttccggccctttgctcagccccatgatgcttggcctgcagagatgggggctgaagggcttggggcatcaaggggacctgacatcttgctgagaagccatcactagacagggctggaggctggagactcagggcctgccctcaccgtggccagtgaggcgtggggttgggcagggaaggggcattcattcattagaccctgccagaagcacctgggtccccttctggggctacaggtggtgaggccactgcccccaagaacacagcctggtgactttagtgtacaaagcagggggagtctccaggggcacagaacagaggctaaagccagggtggaggtggccagcaggcctaggaggaggagagggtcagggccacaccccaggggaggtgcatgtcagccaggggccaccctaaggtggaagccaggagtcccaaaggggcctagagaaggagcagccccccacctggctaccgcagccctctctggttctgtgcagggtattgggatgcgttactgaggcccaaatctgccccactgggaacccccaaaaaagagccagggcaggagaatgagagggaggagccatgaaacccccgccctttaaagacagctctgtggcagctggcccaggccctgcagccctcaccacgttgggactcacttgggggtctcccatgggggtcctaatcccatctcttttcttcccagtccagaatgacagggtccagaaactggcgagccacgagggacatgtgtaggtatcggcacaactatccggtacgtacctgcccctgccccgggacacagaaccctcccgccagctgctcttctcaggcagaatgtcccaggttctactggaaggctggcctggcttgctgtgccagggccacagttctgggcaggaccctgcctggggcacagcctggtatagattcagagccctgcccttcccctctcgcgggagaccgggggcatccccctacttttctgagcttcagcacaccgtcgccttgcaaacatggccatagtgccagcctcgtgatgcacacgtgtggggtccgtgataccgcccacacagcaccccacccccatgccagccctgtctcctgcaggttgtcctcagccattaccctccacacccctgaatcacggaaacccctgtgctgccttcagggtgctgaggaggggacctgccaggcctggcctggctggcgaaatggggaaggggggtccctggggcttggaggcagctgctgtcctctgaatggcccccacctgcagagtgaggagccaggcgggctcttggggtattgggccagcctggaggtttgcagatgcgcctccccgaaagacacggagggccccagggcagcttgtgtctgatggatccctgctgtcccctttctctggctcttcaggatctggtggaacgagactgcaatggggacacgccaaacctgagtttctacagaaatgagatccgcttcctgcccaacggtaggtgcctcacaaccactggcagccggcgcttccatccttgcctggcaggggtggtccactgggccctggtttgggatgtacccggcgattaccagggccacggctttcaaatagccccacagtgccccctggaggcggccagagggactccaggatccccggcttgggatctccgcagtggtgtttgggtcggggtgggctatctctgtaaagagccagagactgaatatctgcagcttttcaggccacacagtctctatcaaaactactgaactcctgcacgacctcatgaaagccacatgtaaaccaacgagctaaggatagcttttatatttttaaatggttgcaaaaaattaaagtagaggccgggcctggtggctcacgcttgtaatcccagcactttgggaggccaaggcgggtggatcacaaagtcatgagttcgagaccagcctggccaatatggtgaaaccctgtctctactaaaaatacaaaaaaaattagccaggtgtggtagcgtgcgcctgtagtcccagctactcaggaggctgaggcaggagaatcgcttgaacttgggaggtggaggttgcagtgagccgagatctcgccactgccctccagcctgggcaacagaatgagactctgtctcaaaaaaaaaaaaaaaaaaaaaaaaaaaaagaacagtgttctattactttgatattataagaaattaaaatttcagtgtcaataaagcttcacgggcacgtgcccacacctgtttatgcacgtgccgggctgcaacgtgaaacagagactgggtggctgcacaaaacactgtcaggcccccatctcaggagactgtgcctgccacatcatgggactgggttcagctgggggctgtgtttgaggacagatttctgtggctgacgggccacgcttttgcaggaggcactgaggccccctcctgtacagacaggtcctggtcgaggaccagtggttcccccagagggaccttccgggctctcagtggggtttgccgccagccagcaacaagggtccaggtcacagatggcagcagggcaagggctgtgcatcggaggagggatgggcagccccactgagcctagcaccctgaagagcctcaggagatgagggcgaggaatagcttggggaagctgctggcagcactctctccttatgtcccccacccacaccccgtcctcctgagcacgggcagggtggctgccacagctgacttgtccccatggggctcccaggctgtttcattgaggacattcttcagaactggacggacaactatgacctccttgaggacaatcactcctacatccagtggtgagttggggaggatggggggatggggggttggcgaggccacagggggagggccctcccaggcaggagccctcccgacgctgcttcctggcacggactgagcactccctgcccttcctggaagctggtgtccacattacacggatggacattactggacatgcaagggccgctgagggaaggctcaggtctgtccccaatctgtgggctcttggtgaccagggagacaggaagggctgcacacaagctccctgaaacaggagagggggcaggcactgcctgccagaggggcagccttagtgccaggaggcctcagtgagcctcaaggggcggcccccgtctcggactcagctggggcagggtcctggcgtagtgctgggatgagacttgtggcaggcgtcttggggacccacaatgtggccccggaaacagcatgccctgctttggggacagctcgctgggcgtccacagggagcctctgctggtgtgtgacgtgtcatgagtgacaacacaagagagggaagagtgaggagtagaaaggaaggccctgtccgcccgggctggatggctgcagggcccctcgctgcctgagtcacctccccagtcctgctgagcatgcaggctgtgacttacgcaccacacacctcctgtcctgggcccttgcacgctcacctgagctctcccaccctcgctcctccacctagccactccctcctagagttgagcctgggaacccagaggggattggaactgccccgggctacacagcgagcacctgcccaaggtctggaagcggctctcctaatcccttgcctgagcatctcttctcctgcaggctgtttcctctgcgagaaccaggagtgaactggcatgccaagcccctcacgctcagggaggtcgaggtgagccaggccttggctgtgactggaggggaagatggggaggcctgggcaagccacgccgctgcagagacggggtcgcctctggcagtaggcatttggtgccccctcaggggtcccttggaaggcagaagggccgaaagagcctccagtatgatgaccttccctccccagtggtcctcaccccaccaggcatctagagaaactcaatttccgaggctgtttgtccccatgcgggagtctggggctgagcccctgagagacccggagtggcgggacctgcctttctcaccactggtttaggctggagtggggtcacccaagtgtggaagctgcccctgagggatgcagggacttagagagccgaggggcccctcctggcactttcccatggccagcgacttcctctcaggggagggcggcagcctcaggccctggtgagagctcggagcagctcagaggagagatggaggcatgagtgtgtctcttgtcactttaccctaaaagtctgagtccaggctaggtgccgtggctcacgtttgtaatcccagcactttgagaggctgaggcgggtggatcacctgaggtcaggagtttgagaccagcctggccaacgtgacaaaaccccgtttctactaaaaatagaaaaaaattagccaggtgtggtggcaggcaactgtaatcccagctactcgggaggcagaggttgcagtgacttgaggtcacaccattgcactccagcctgggcaacagagcaagactctgtctctaaataaatgtctgtctgtctgtctgtctagtccaggcctctgagtgagtcgggacccacggccacccccacactcaggaaccggggcttcagggatggtgcctgagctctccaagggggtcttttccaggtgtttaaaagctcccaggagatccaggagcggcttgtccgggcctacgagctcatgctgggcttctacgggatccggctggaggaccgaggcacgggcacggtgggccgagcacagaactaccagaagcgcttccagaacctgaactggtgaggcccggctgctcccgcccacccccaccccggcgcagaacagggccacgtcaggtttcgggcaggtcacagagcgctgctgcagacggagaactccagggctgtttgggcaatggaccaaggccctgagtcccctccttgctgcctgtagagccgggcggtccctccccgatagggttggtgagaaggtaaagaatgctcttcctgcacccaggaggtggcagtccacatagagaagcaagcaggggtgatggagaacctgcaggcggtacagccagttctcacagggtgttcgaggcgcctgtaccctgcaggggccccttgtggctctcatccagccagctcctccccaccagggggactcggggtacagccaccctctaggtgatgcgtcagcatccccctaacccccgtgtgtctagggcccacaggccattttcacagggatggcatgagtcctcccctgggcccagagaggtaaatggagagagagactgaatcgtgggccagggtggggagacctcgtggagccgggtgggagggcaggccagggcggggtgcggcccagcaggaggggccccagccattgacctctcctgacccggatctctcgcaggcgcagccacaacaacctccgcatcacacgcatcctcaagtcgctgggtgagctgggcctcgagcacttccaggcgccgctggtccgcttcttcctggaggagacgctggtgcggcgggagctgccgggggtgcggcagagtgccctggactacttcatgttcgccgtgcgctgccgacaccagcgccgccagctggtgcacttcgcctgggagcacttccggccccgctgcaagttcgtctgggggccccaagacaagctgcggaggttcaagcccagctctctgccccatccgctcgagggctccaggaaggtggaggaggaaggaagccccggggaccccgaccacgaggccagcacccagggtcggacctgtgggccagagcatagcaagggtgggggcagggtggacgaggggccccagccacggagcgtggagccccaggatgcgggacccctggagaggagccagggggatgaggcagggggccacggggaagataggccggagcccttaagccccaaagagagcaagaagaggaagctggagctgagccggcgggagcagccgcccacagagccaggccctcagagtgcctcagaggtggagaagatcgctctgaatttggaggggtgtgccctcagccagggcagcctcaggacggggacccaggaagtgggcggtcaggaccctggggaggcagtgcagccctgccgccaacccctgggagccagggtggccgacaaggtgaggaagcggaggaaggtggatgagggtgctggggacagtgctgcggtggccagtggtggtgcccagaccttggcccttgccgggtcccctgccccatcggggcaccccaaggctggacacagtgagaacggggttgaggaggacacagaaggtcgaacggggcccaaagaaggtacccctgggagcccatcggagaccccaggccccagcccagcaggacctgcaggggacgagccagccgagagcccatcggagaccccaggcccccgcccagcaggacctgcaggggacgagccagccgagagcccatcggagaccccaggcccccgcccggcaggacctgcaggggacgagccagccgagagcccatcggagaccccaggccccagcccggcaggacctacaagggatgagccagccgagagcccatcggagaccccaggcccccgcccggcaggacctgcaggggacgagccagccgagagcccatcggagaccccaggcccccgcccggcaggacctgcaggggacgagccagccgagagcccatcggagaccccaggccccagcccggcaggacctacaagggatgagccagccaaggcgggggaggcagcagagttgcaggacgcagaggtggagtcttctgccaagtctgggaagccttaaggaaaggagtgcccgtcggcgtcttggtcctcctgtccctgctgcaggggctggggcctccggagctgctgcgggctcccctcaggctctgcttcgtgacccgtgacccatgacccacagtgctggcctcctgtggggccactatagcagccaccagaagccgcgaggccctcagggaagcccaaggcctgcagaagcctcctggcctggctgtgtcttccccacccagctctcccctgcgcccctgtctttgtaaattgacccttctggagtggggggcggcgggcagggctgcttttcttagtctgataccaagcaaggccttttctgaataaattcatttgactttgagtctttggtatggaccggggtcctgttgggtggctggtagggctggtgtcacagctgatgtccctccaggctccagtggcctggcccggcgaccgcctcacattgctccaccaggtgcctgtgggggcagagtggtggcccagccctccccacacacccacttggccacacagtccccaggcatgaacaggtgggcaggctgcagcctcccagagcctctgaaggtggaaccgaggtccctcagcaggcttttgccacctgttcaagatgagtctggggcttcccttggggttggccggggcagtgcttgtgcatggtggggtctggaccaggcctttctgcctgctgtgatctgggatgcgctgctgtgcctcgggcaggcttggcagtactctctggcgggccccttggctccctcaggtctggtggagccaggtgtgcccccagggcagtccctccctgcagtctgcccttgtcaccctgggccaggaccccccgcttcccggttcccctacatttctacatcagcagggtaaggggctttttgtggggcctcagaggaggggccggacacttgtctttgctcagtgaaggacagggcagacctggggcacccctgggtgggagggttaaagctgtagaccctggtaccacttcaggtaaaatgcccagctcccatctggtggcacaggatacacgagccggaagtcactgggaggagacacccgaggttcaataatcccccagagctgcgtggggaagctgtgggacccctggtgcctcaagtgtggctcaggggattcctgccatggagggaaactgaggcagtgagctggacatagggctagaagtgcagtcactggggcagcgcccggcagatccagcgtccccagtccaggccgttgtggggctggagtcggtgaaaatcagcgcctgaagtgaggagcctgttggagcagccctgggggccgatgcctggcggtgggcacctggggacagcaggcagtgctggccagccaacccgggcttcagggagagtgatgacccacaacaggcgggcagcaggaggctctgccccactcaaaagtgagccgggggaggctgagctctgacagtgcccaccctctgcctaggatctgcctggagctgggggtggttttttgaggggcttgaaggtggttcgggggggacaccaagcaggtgtcccaggcatgaggtggctcccctggcctgaggtgaaggccagctgtgttttgtctgatttgggtcagatagcagtccttgctgactgcatgctgggcatcatggggataggcaaagtggggtgtggggccagggaccaggggagagccactgaggagggggctggccacagggtcatcttgccaggtggaactggtagggaggacttatcctgtcccccagaccctgggcttggggtggggctggtgctgggagcccctaaggccccctgctgtctgggctgacctgctccacccacctctccccgtaatcaaaagtcctctgttaggaagctctgtgccaggatgacttggactcctcaggagggtgggccttttcagctcctcccacctcgcctgatggaattcgcacacacccctcccagcccagccaccgcgctcacccagcagtgaagggagaatctccctccactcacttcaccgcgggagagattagagcgacactattattttgagacagggtctcactctcttgcccaggcaggagtgcagtggcgccgtcttggctcactgcagccccgaccttacaggctcaagcgatcctcttgcctcagcctcccgtgtagcgtggactacaggcgagcaccaccatgcccagccgatgttttaatttttggtagacatgaggcctccctctgtctccaagctggccacgcccggccgatgtttcaatttttggtagagatgaggcctccctctgtcgccaggctgactgcgcccggccagagtgcggtgctcctgctgagcagttttgcgcccactcccctctcatcccctcccgcccttgctaactcacagcattgcaacagtcatgagtccccacctgccgaaaggaagctcctgcagccccctacaacccccagggcagcctttctcgggaattttcaagattcctgggggaggggctggcatctgcgccttcactgagcctacaggcaactggaagctttgagtcccctagggcagcgactgccctggcagcctgaggcagagcttggccggacctggcgacccctgagcttctgggaaatggacatggccagcaccgccttcaggttcctgcccagggcacggttccttcaggccggggatcccggggaggggttcttcccctcggccagggtcatcgttttgcgatctctcctgggagtctgggtttggagtctggtcttagccggtagcaactgacgtggcctgaccacccggcccgtccaggtccacgggtgaggggccgcggtgggggtgctcccagcccagcaggcagcgctggacagtgaccccggagcgggaaccagggctgcgctgggcactgaccgggccctggtaccggggattcaccctccccggggtgttcctgggccttgggtcgcctgggtccgctccggcgcctggggaggggtctgcggcttcggaaactcgcgggtctcccctgcccctccctgaaggcggcccttcagcgccgcgcgcttccgcccccacactcgggttgaggagcaaggagagaaaagagcgtctttctctcttgctcaaagctgcgtgtgtgcaacgcgccagtcccaggataattttaactcgcggccggagagaacgcgccgcccgcccggcgtcttttttgttttcgcccaggcgggctgggcggcggcgcggggcgggtggaagcccccccgcccaggtgggcccggctgaatggggggcttgtgcaggcgggggcgggaaggggaaggggaaggggccgcccacctcccgccccgcccgcccgcgcgccgcccgccccgacgccgcagctcagactccgctcagccatggccgggccgcgcgcgtgcgccccgctcctgctcctgctcctgctcggggagcttctggcggccgccggggcgcaggtgagcgcgagctccgggctctgaggctggacgtggagccgcgaccgccccagccccgaacccgccactccggggtgcccggcgcagcctcgacgcccccagcccgtgtcgccgtcggggcgcggagtcgccagcgcctcgggatgagccccgtccggccgcgtcctcgatgggtcctcgctggcccgggtcggccggcgccgccgcctcctctgggagcacaagggggcctttgttcccgccgccggagggaggcgggggacacactgcgcgggggcgccgggctccgcccgaggctttgggtctcaccgaggagagcggcggtcgtcgcaggccccggagccgctcgggacccgggaggaggggacgccgggtcaggcccacgggggcacctgcgctccttaatgagttttctccgtttcagagagtgggactccccggcccccccggccccccagggccgcccgggaagcccggccaggacggcattgacgtgagtttgggggtggggagggccccgagcgctctggggttctggctctggcccccacctccctgagctccccggcctgatggagagaaaaccaggccccacctcccagagccggggtgacatcaggggacagccagtgccttcacgggatgggggtggccctgcggggactgctggtgggtaggggtggagggtgtcatgtggtggtcctccacccagaatgccggcactgaggtgtgtgtctctgggtcccctgaggggcccgtgcccctgtgttcggggttctggcctctggctgaagtggggagaggcacgtcctttgggtggttgggggccgggggtcttgttggaggctgctgggctctggagccagccatggagggggcttaggagccgactcagtcctgagatgatgtcccctatgggtatctcaggactggtgtgggccaagcagcaggaggaggcggctgaaattctacaattgtgcctccctcggagggaccgtctggggtgaacctccccatgtgaccaccaccagggcaggagtcccctcagggcctgtccacgctgtgtggtccccgtggagggctgtggagggctgcaccaagagccccccatgacccaccctctgcccccctgcccagctcggcctcaatggccacagcctccttccagtctgtccagttcacccctttgcccagtgctgccccacacatgggagggtgccctctaggtagggatcgggggctcaggggccccttttgtctgctggggctgggcctctggggctgatttggaggccagcgctgctcttttccccgaggcggggttcttgagggacccctgattttcagggttacatgtgggtgtctttcctcacagggagaagctggtcctccaggtctgcctgggcccccggtgagtgtccctggctggggagacagcctttttccagtctggagagaaagggggaactcagaacagaggggtcattgatatcctgtctcatcctgccggagcccgggttgcctgaggggaggcctcagagggcttggagcaggcctggagccagcggggcgggaggggagtgtgtgggctcagcctctgcatgttcagggcagggcctggctttgaagctttctttggaccagcgccaggcaggccgggaccggggctggtacagcccttcaggtcccccaggcctgaggtcacctggagccctcccaccttcttcagttccaggggttgagggtcctggggctcagagccctgtctgggcccactgggggtccgacagagatgcctgctggcccttagccagggaggccgaggtgaccagacgaaggtcttacagatgccactgagggatggggcgggcagccttcctgggccagcaaggtgtgggcaagcaggacacacgtgccccagctgagccgggtctgccagacagtaggggggacccaggagaggggcccatcccgtatggttgggctggggggaagtggaaagcattttgcttcattgctgaaggcctgggctccaggccagaccccgccttcacatctctgccctttcctcctgcacagggaccaaagggggccccaggaaagccggggaaaccaggagaggctgggctgccgggactgccgggtgtggatgtgagtgcgcctgcccctccccgccatgccccactccccgctccgggtccctggaggagtccggccctaattgctgttgtccagctgggcctgctcaggcgggaagcccagtcctgagagaagtctccagaagtccccaacaggggtcctttggccttcatcccagacgccaccagcatctggcaggggacagagccagcccagtggagtcggaagtcccgccagccctccttgcttgtccaggaatgagtgcccattgtcaggaccttctgcccactgctggcctcacttagtcatcttgggctccaggcctggccccagggccacggagttttgttcggaggaagccgggcctgagaagtgagctgtccagtcctgctgggttggtccccgaggcctgactacagcaggtgcctccgttgctggcttcccgctggctgccccctccctcctcccagagcctctggctacagcaggcagacagtggacagggccaagagaggaggctgccaccctaagggtcttctatgcctctctggactcaccaagggaagggtccgtgcttccatttttgcctggggggtggcatgtgcttcccatgtggcccctcgagctcgccctctgcctctccccagggtctgactggacgagatggaccccctggacccaagggtgcccctggggaacgggtaagtgcctgcgccgaacccagtggcttgggttcagaggtgaggtcccctggccacctctggctgctctgtgtccacaaggccaaggagctggtagttccaaggacagctgccctgcccgtgcctggggtggaggggcagaagggcagggtgccaagtggccagtcccctgtgcctgcctccctgcctcacctccacgtatggtcagagttgtcctggtatccagaccatggcagggagaagggggatggtttgggggaacccaccccaggtgcctcctcagaatgtccctgaagcccccagggccctgggcagaccaccaccagggacccccgggcacgcagcctgcagagtcccctgtgcctgcctgttggacactgaatcctttaccctgacggagcggcaccaccacccaagggtgcctttctccccttgtggcttctgagtacaaacccgaagccagcattctctctttggcttcataagacgtggctgtcagccaaccgggtgccactggccccaggcgcaaagcatcacagagggcaggaaggctgggctggggacacgaggacacagccctgcccttgggacccttgggagctcgtcaggcatgaggcggattctgagctgaaaacaggagggaaacagtagctgctggcagccgagtccgtggtgcccaggggtgtggggtgggctggtccccaggctttcaggaggggcctccagcctcagcacagggcccgtgcgtgccgtccagggaatgaggcatttcaggcagcaggggccagacagggcccagagggtgtggagggcagacagggcctggctgcccaaggctctggggctcgctgacgtgggcgggggctgaggactcagcaggctccgtgggtgggttatcgggagggcttcctggtggagacaggcaccccgggtcacttcggtgcctctcagccctgcctcaggttgcaccttcttgcagcgagcgctgggactctggtgccatctgtctccagcagctccccaggacggcaaagaccctccaggtcaagagggctcagaggccctgcccctctgtgaagtggggacttggaccctgttgtcctgggagttggagttgtgacgtcacacttcagagggaggggattgggtttgcaaatagaggcccagcccaacctagacgcctgctttcctcccacagggaagtctgggacccccggggccgcccgggctgggggtgagtatggagtgtggtcctctcctctccatgggagtttggggagctggagagtctggtctaaatggggtggcctccaggaatcccagggaccatccctggccctctcatctgcagcctctccggaggctggtgcctggatggggtcctggtgccctctctgggctgggaccagacacccatccctggaaccgccctttccccaggacccacctgagccatcttagggaggggtgaggcgcagcccttcttgtgcctggcaggctctgaccccatgtttggctttgcagggcaaaggcctccctggaccccccgtgagtactgacaacccttggggccctgagcaagcacgcaagtcccgagagcctgccaggctgggatgtcccaaaccgtgcctgggggtggggcttctcaggggcagccatctgaccaccccatacttggagcccctctcccttcggaggcggcacaccaaccctgggtggggatcctcggggcttccgggtgcagacctccccacctctctttacttccctccagggagaggcaggagtgagcggccccccaggtgggatcggcctccgcggccccccggtgagtggctgtcccagagcccctcagagtgtgctcacctgtggcctccacccccagactcaacagccaggggctcccttcccctctcccttttccctttctcccccaaccccaccttggtgggtgttggtagaagccctggccaatgatccagacccgacctcaggacgcagacaccagcacagtccgtgggagtgggggctggtgggagctgggcgtgtccacctccctgggagaagccgggcacctcactcaggtgggggctggtcccactctgtctaagtcataccccctccccagggaccttctggactccccggcctccctggtcccccaggacctcccggaccccctgtaagtactgggcagaggctctaagaagtgctgggcatggactaggacactgggttggaccctccccattccccctccccaggctccatgcccctccgagatctcctaaccctaacttggccactcccaggaacagtcaatggtgggggcagtggctgtggctaggccagccaacttggggatggtcaggactcaggtccccatggccatcctgccccaaggacaggtggattctgtcgttgtcacatgccctgtgggtgggccagcagctcccagcactggccacttgggggacaggatgaagggtctccaagtcccctggtggatggggaaggttgtggtccgtcagagagtgggtgggtgggttgggtggctgcaggtggctggggagggcgggagaatgtcagctgtctctttttgtcttagggacacccaggagtcctccctgaaggcgctactgaccttcaggtaggcacttgaagccatttgttaagggtgctggggggtgcctaccttggggggaggggttctggcctggagaggggcttgtccatactggcaagaaggcagggcccgagccctccctggggacaggagctcagagcagacagctcgggcacaacctggcagagaggctggctgggacctccccctcccccttcccaccctcctcaccaccgtctagacctgcactgtccctcatgaagccaccaggcgcatggagctgtacaaatgtaatgaatcacaatcatgtcacagagccatccagctcccctgcgtcatccgcagagggcgcccttggccacagatggcgacagaactggagtctgggacccacctttatcttgatctttgagccttgtcatttgcctgaaaagaaaacaggctcaggtcaggcgcagtggctcaggcctgtaatcccagcactttgggaggcccagacaggaggatcgcttaagctcaggagtttgagaccagcctgggcaacatagtgagatctttgtctctacaaaaaattgttaaagtagccagacgtggtggcgtgcctgttgtcctagctacttggatggctgtggtgggaggatcacttgagcccaggaggcagtggttgcagggtgctgtgatcaagccactgcactccagcgtgagcagccaagctcaagcctgtctcaaaaaaatgaagaggaaagaaaatgggcttcggaggccacggatccatctctcctctctgtttggccgtccgtggtggcagtcagcgccttgtttccatagagaggtttgatagttttgaagggaaaagctcggcccactctgacctgaccaccgacgctgtctaccagcctctctcctcaccccaccccggggcctaggtgcctggccagcctgtgtcccagaagggaggctttagggaaccttccagaatgtggtgcgtggttgggcccccgatcgtgggctgagtggggcaggggctgaagatacgggtctgcacccttggcctggcctgcccattgcagctgtaggatcatctagaagcagccctgggtttcctgagcatcagacctgttgcctgggctcacagtgcccctcctaaaagccccatgccgagcacattcctgtgctgaggatgggcccgacctgaggctgctgcaaggccccctgcagtgccggccgggactgtgctgaatggctgctttgatagccagtgtctgccgtggggccggctgctccatgcagcccctgctgcacttggccagtgctgaaggagaccctgtctgtgtcctgtcccagtgccatcacctgtacggagtggcctcctggggtcccgtcactgtgtggagtggcctcctggggtcccgtcactgtgtggagtggcctcctggggtcctgtcacccagagtgtcccgacacccgcgcggagtggcctcctggggccccgtcacccacgcggagtggcctcctggggtcccgtctctgtgtggagtggcctcctggggtcctgtcacccagagtgtcccgacacccgcgcggagtggcctcccggggccccgtcacccacgtggagtggcctcctggggtcccatcatctgtgcggagtggcctcctggggtcccgtcactgatgcggagtggcctcctggggtcctgtcaccatgaggagtggcctcccggggtcccgtcaccgtgcagagtggcctcctggggtcccgcgggcgctgacccctgcgtcggacgtcctgctctgtttggctgggaggggtctgactgctctgttttccgacagtgcccaagtatctgcccgccaggtcccccagggccccctggaatgccagggttcaaggtgagtcacgggtgactgggacccaagcaccaccctgtgctgggcaggaggcagctgggctcccatggggctgtggaggtggcgggtccagaaagctggaccctggttccagggttgccccaggaagaaagctaggccagcctccttgtcccgccttcagcaccccagtgacacgctgatgtggccaggctgggactggccataggcgtcagagactgcgggggagagctagcctcaagctcccaccccagcccagccctggcccgctcctgaccgcagagcgccctcatgtgggtcctagcgcctctcaggcctcagtttccccatgagggcccagacccgcggtcctgtgcgctgccgtgtggcgggccctgggctgactgaccctgcaggcctcacttcagtgttgccagggagggggtgtcggggggtctgggtggggcagtgaccccacatttgcttgcagggacccactggctacaaaggcgagcagggggaagtcggcaaggacggcgagaaggtgaagctgccgcacagcagctggggaggagctggggactggaggctgggctccggcgggagggaggggctgggctccggcgggagggaggggctgggctccggcgggagggaggggctgggctccggcgggagggaggggctgggctccggcgggagggaggggctgggctccggcggtggggagggaccgtttcatgggtgcacctgcactggcaccttctgtgcctgtcttccagacagggcctggctggtcagagctgggtgatttaggcagggtccctggacagaccccgtcctgcctggcctcgctgtggaagctccctggtttgtgtctgtggccggggcgaggggcatctgtgaggatggctggctttagcctgtagcctcccctcacctgtggtcgctgtccgtggagggtgtctgtccatggtcacctgcaggccgggggaccaggtctgggatgccctttagcgtggctggagtgatcagatgaggagaccccaggtgcacatcagaggggtccctgcttggccacgaggaggggcctggacagggctgaagggccttgtgggaacagtgaccacggaccccggcccggcagggcgaggccaccgagactcgcgggactgctctggaactgtgggcaagtgtccccttcacagagcctccaaggcccagctgtgaagggggcaacacccccagctgcttgggcttgagtagggtgactggaggcaccgaaaggtgcaaggagagccagactgggccgctgaccaccctatcccctctgtttcagggtgaccctggcccccctgggcccgccggcctcccgggcagcgtggggctgcaggtgaggctaggaaggggtaaggatggtgggatgggaactcagcccacagagtgatcaagccctgcacatatctacccccgagggggccagctccggctggggggtgtttggccaacacccaggcacaggagcgcgacctggctgggggtcccacctctgccaaggctgctgacctcaaggctggtgccccctccctctgggggacctgagctgaggctgagggctcatggaagacaccagggctcccaggggtaccccgagggccttggccctgggtgctccccggggtggaggtgcagccccagcctctgcatctgtgcctctctctcgcagggcccccggggattacgaggactgccagggccactcgggccccctggggaccgggtaagtcctgcagcccctagtgggggccggccaggtggctgggggcctggttgtctgcacctccagacttcagatgggccccgtgagtgacactctgaagcagccggcaccctggctctggccatcgccactgtggcgcaggccttgctctgggcccctgttctcgcatgtgcctgggcgagagctgacagtcggcgctcactgatgcccgcacgcggtcccaggctgctgtgagggctattcacgcgtgtgcccgggcgagggctgatgaactctgctcgctgacacccacacacacggtcccaggctgctgtgagggctgttgtggcttaggccagagcaggaggggaagcagggatttggagactactaggtggcatcttgggggaacttgctggggagccctagaggaagggctgcttgtgtctgggccgcccctgagggagcactggggggatgccagccaggcctcagacaagaggaccccggatcccctctctcctctgcagggtcccattgggttccgagggccgcctgggatcccaggagcgcctgggaaagcggtacgtgtgtcagtggacggtgggcgccatgcctcgtgacctctctcccctttccctctgctcctctcagacgcccccagccccactggggcccctcttctgtggctgagctgttccctggacaccctgggagggcttgtggcatgggtacgggggtgcttaccaatggaatccattctttgtgagacattcgcctcctttctggttctggacgtggaatgaggggtcaccatcgtccctctggcacctccagccatctctgaccactcctggagggcccaggcctggaggggcccccatcccactctctgaccactcctggagggctgtcccccgcccgggcctggaggggcccccgtcctactctccgaccaactccatggtgttaactctgtccctgccccacctcatcctttccagggtgaccgaggcgagaggggcccagaagggttccgcggccccaagggtgacctcgtaagtgagagggaagttggttccctgggtccttatgtggaagaacccaatttccctcctgactcgtgctggggagggggacacacttgggagtgagactgcaaggggctgcctgggtgggcctgggggtgcgtgggggtgagcctgaccctggagggcccgagctctctccctggccccagccgttctcccagagccacatgggagctctgtggccccctgcagagcggcccacgagccgggtggagggaccaggctccagggcttggatcctgcccccagagaaaacggctctcgggttgagcaagtgaacataaggaaagtccagaggcagccaagcgttccaggagtggaactgaagtgaccgtccccagactggtcagcctccacacctccctcgactgagccctggcagccggagtgcagggagccgccgtgccgtcctgcagcatctgtggatccaaacacagttttctccacgcacccacaggccccagggtggtggtcgggggtggcccctgccgctgcccaccatagctccttggtgtccccgagcagctggccggagaatgcgtgaggccgtctgggaagagactgccactgcttctgtcacttgtgtgtcctctagggcagacctggtcccaagggaacccccggagtggccgggccaagcggagagccggtgagtgcacgtggctgctcatggaatgctcctcccccgggtcctgggtatgtacaggtggagatggcattcagaagggctggagctcagtgccctctgctgtggccatcttgaaatctgggttaacggtggaacagccccgcagccccacacatttctctcttgcccagagcctcacgagtgtgcaggagtaggggcctcaggctgggtttacctgcacagaggacacgggaagtaagggtgggtgggtagcaccactgggcagaggtgggcactcccagggtcccgggcacccatgcgggcaccttccttcctgctgggtgcccaccctcagcccagacctgagctcccttctagcccctcgtgttgcctctgccccggagtagtgccctgtcttgggacacccagcagttggctgtgtcctgattccaaaaccagtccagggtggacgaggcaggcctggcctaaggcctcagtttccccaccgtaaaatgggccagaaccaaacttccttagggcaccatgatgtgcctggtggacgaggcctcgggcgtcagcactgcatcagcaccgcctctgccacccacccgcacccctcacctgtgcggtcaccgaggcagcactggttgccacacggccaccttggtcatgaaaccagataactgccagggtgtgggggcagacacagttttaggttgatggggaaggaggctgcccccagggcaggactgtagagggagggaggggggccactgcccgacgggccttactcatcccttgtccccagggcatgccgggcaaggacggccagaatggcgtgccaggactcgatggccagaaggttggcatggggctcagggtgtgacgggagggagggggctggaggggagttcggcctcccgaggcctcagcctccccttccgcaccccaatctctgtcctcacagggagaggctggtcgcaacggtgctccgggagagaagggccccaacgggctgccggtgagtgcccggcgggtggggccagcctggggcgccacagcttctgcctgctcagtggcccatgttgggctgggtgggttggtcactgtagggccgactccctgtgaggggttctggggcctgtgtccatcagggcctggcacaacccctggtgcccagtgggtgctgtggacggttgcctgtatgtttgcatgtgtgtgcttattcgtgtgtacatgggacatgtgtgaacatgttgatggccatccctggatgccgtgcggtcatcacccccatgggctctgagtaggggctcctgcatccaaggccagggaggctgtcaaagccgcacctcaggtccacaaggctgggagaagttggccctgcctttgggtgcactcactctggcccctgcaccctgcctgcgtgcacgcccctgggtgctgctgccggcgtgcaatgtaactggcagccctgaccgcaagctctctcctggcagggcctccctggacgagcggggtccaaaggcgagaagggagaacgggtatgtggctgcagccgctttctctctgggaggggaggcgaggggccgggaggcaaggggctggggggccagcgacctggccccagtgcaggtgtaggcaggcactcacagctctccttcctctacagggcagagctggggagctgggtgaggccggcccctctggagagccaggcgtccctgtgagtatctgcggcgccccagacccctccccatccagcctgtgtgcagaccctgccctgacaccctccttcctttccctgtagggagatgctggcatgcctggggagcgcggtgaggctggccaccggggctcagcggtgagtgcagggacatggcccggggtcgggggttagcactgagccattggcacatggccccagtttctgagcaggccggggtggcatttggttgccttgatgggccaggcccacaaaagcctaggatgccaggaggtgtggggccccatcttcttgtccctcacccgctgggagacggtcggggccaggccggagctgccctgttttcaagccttctatgctgagcccagccttgtgcccccatagactgagataatgacagcaccagccacagggccctggtggggggagccaggggcatgggtgcctggccccgagtctggcctgacaaattgggtccagggtatgcctgagttctgagaccccctaaactgccctgggaggtagccctgcctttgtccccagcaacccagccaggtggcttagaaccggctcctgtgtccacccactctgggggaaggctgagccaggctccctggggcctcttggggactcctcgaaccctgagacatccgctcacacctcacctttgtcttccagggggccctcggcccacaaggccctcccggagcccctggtgtccgaggcttccaggtgggtgaggttggggcaagggcctggcatggggggcggcacacccagacgggccagacccgacagggtatgggcactgacgagccaggacctccttccccagggccagaagggcagcatgggagaccccggccttccaggcccccagggcctccgaggtgacgtgggcgaccgggtaagtggccctctcagcaggaagctcccctgcaccccctctacccatgtaccacagtcccccacccccatgacagtcccccaacccccaccacagtcccccaacccctaccacagtcccccaacccccaccacagtccccaccccctaccacagtcccccaacccccaccacagtcccccaccccctaccacaatcccccaccccccaccacagtcccctgggacgcagacagggagaggcccttgcagctcccagtgggaaatctggccatgggcagtgtctccctgcgtggcggaggcagtggcatcagggccccgactgtggcgcctttggcccctctgaccttccacgtggtgttccttgtgggtgggaggctgcgggagcctgggccgctctgcctcctgccctgcgtagacgcctggcgggacctgcacacggtcagtgttcattcctcgagattggcgtggaggctgaggctcaagagccacgcctgctcccgcctagcgggtgtctgcggaggcgcggttgacagaggatcacgttgctataaaataggtttgaacaccatgtcccaagtgactgtaacggtcacagcttctacctcgtcaagactttttcctgctggtcttgcagcagctgcagcattagctccttgggggtccgggcagaagcggggcacggcctacccagggccccagctcactggaaggagcctgtgggtctggtctgggccccagccatgctccaccaggtccttggggacctcgtgtgcctgctgtggccacctctgctgggcagacagacccctttttagatgtcaatcccgagaagcctccaggacacggctgcagatgccccgtcattccagggtgatggtcattccagggtgatggccggggctgtggacaccaccaccccatgggggatagcgggctgtttattggcctccaggcaggacattccagaggtgggggccatgccagcaacctcagggcctccgagagatggcagggctggcacccgccctgcgggcactgcgcctgtcccaggtgtgggtggggcctggtggctgaatttccctttcactttaaactcacgggaaagtctcctgcttttctgccctttgggccagttctcacttatgtggccatgtgagcaaatggacattttttaaagggattcatagcaactcccagacatgtcctcatttcacaatgccgggggaaggtgattagatgagcttttgcatctttgactctactgtgacggaattatcctgcaattgtgcagaaacacccgcacgaattcacgggtgttacaaacagtgcaaacctaacgggacttcactacccacaaggggaggctggacagagccatcgggcccagaggctgtgaacgtgagcttggcctttgggcctgtgtctgggagccggtgttcacagaagccctttgtgcagcacagatggagatgtggggaggtgtttaccattcctgggcccagggcaggctcactttagggattcctgccattcctctaatccagagccttctctccacatccagggtccgggaggtgccgcaggccctaagggagaccaggtgagctgggcacaggctggggcaaaaggaatgaaggcaaagctgcacagcttctcccaggctcctcctgtcccggctctggccctggctgtgttttcgggacactgagcctcctttctcctcttgccgtgtctgtcagtcgccctttctggctcctgcccctcctgcttagcacagcgaaagcagctctgggcacccagcccccaggcacgccccggcatccgccgctgccttcctgggtgcaaacagctggccagagtgtccctgcatggctctgggtgcaacagaagctgcttctagtccaggaggcaccaatgggaactctcaaagggacagaggtgtgtcctgccatccttccggagaactgacagagggcaggggctaggctctgcgtgtgtgttttgcaggcagattcgaaatgcatttctgctgttcgaagcactcttctttttggaaaagtgtcagggtgggtggggccatggccgtggctgccccgccctcctgcagtgcctgctctcacttctaggcacaaggcctttccataccgctggagggcctgcagccatcgaacccccaccgcaggttctgcttggcagaaaagcctcattatgcaaacaaatgtcttccgttttttggccccgcccctgcctgcaggtctcccaagggctgtgtttggagcgggttaaaaggcagccctggggcctgggcttttggcctcgaccttaagatgaacattacacctacggaggcttgagagcagggactttaaggcatgaagtccctactcatgcatgaacagctcttttaactttggggtgtatcgttttcagggtattgcaggttccgacggtcttcctggggataaaggagaactggtgagtaattaggtaacctcactgttaccaacagctgggagcgaggtcgccactgtggctggggaacagtcctggggacagggtcaaaatctgcagctcccggtggaagatcggcagctctgctgggcagcgtggggatggagcagggtcgggcagaggccttggccactggccatcccttagcaagtgggcagggcctggcagggaaactcagcggctctggagtctgacctgacccggtgctcagacgtgtgggctcccgcactctgccccgtggagtggcacctgcatgaagcagtcacagctgcatttttgtttttttgtttttggttttttggggtttcttgttttttgttttgagacgagtctcactctgtcacccaggctggagtgcagtggcgcgatctcggctcgctgcaagctccgcctcccgggttcacgccattctcctgcctcagcctcccaagtacctgggactacaggcgcccgccaccatgcccagctaattttttgtatttttagtagagacggggtttcaccgtgttagccaggatggtctccatctcctgacctcgtgatcatcccgccttggtctctcaaagtgctgggattacaggcatgagccaccgcgcccggccgggggttttttttgagacgaagttttgctctgttgcccaggctggagcacagtggcgcgatctcggttcactgcagcctctgcctcctgggttcaagcgattttcctgcctcagcctcctgagtagccaggattataggccctcccacagtcgactaattttttgtgttttggggggttttgtttgtttttttttgagatggagtctcgctctttcgcccaggctggagtgcagtgacgccatctcggctcactgcaaccttcccagttcaagcgattctcctgcctcagcttcctgaatagctgggattacaggcgcctgccaccacgcccagctaatgtttgtatttttagtagagacaaggtttcaccatgctggccaggctggtctcgaattcccgacctcaggcaatctgcccgcctcggcctcccaaagtgctgggattacaggtacgagccaccgcccctggcctaattgttgtatttttagtagagacggggtttcaccatgtcggccaggctggtctcaaactcctgacctcaggtgatccacctgcctcagcctcccaaagtgctgggattacaggcgtgagccgccgtgtcaggcccacagctggtttttaactgaagaaaactccacttccacaggcctaaaactcaggtgaagcataaaattacgttcttgtttgagtcccttgataggcacatttctccttctggaggtaacaaatggagcagtcgtgagtccgagggaaggacggcctttctggctttcccgaggggggttttcatctatgattaagtctttcctttgcgtctgggtgaaatagaaacagcctagccccagggaccccagtctctggcagacccccacagcccagtgtaaactttttatgcctggggacaaaagacctcagttgtatgtgtttcatttagtgaattctttttttatttttttttgagacggagtcttgctctgtccccaggctggagtgcggtggtgtgatctcagctcactgcaatctctgcctcctgcgttcaagcgattctcctgcctcagcctcccgagtagctgggactacaggtgcccaccatcacacccggctaatttttgtatttagtagagatggggtttcaccatgttggccgggctggtctcaaactcctgaccttgtgatccgctcgccttggcctcccaaagtgctgggattacaggcgtgagccacctcgcccagcccatttagtgaattcttagacaacactgacaaatggaccctggaaatcccagaagctgccctacgtggccactgttgctggtggggtgaggggcagagccccttgcaggcggaaaacctaaggctttgctctcagctactcgcacggtcgggctgtgtgaggtgaccccctaccctcctggcctccgcggagcatgctgtctgggcccggtcggtccctctgctgtgcggttagactgtgtcagtctgtattctgcagctgtaacagaacaccgcagcttgggtagtttacaagggaaagagatccatgtggctcctagttctggaggctgggaagcccaagaccgaggggtgcatccatcgagggcctccccactgcgtcattccatggtggaaggcagaagggccaagaggaggtgccagagagagaaaggggcccaacccatccttttcatgaggaacccactgcggagacaacggtgttagtttactccggagagccgagctctcaaacctaatcacctcttaatagcattgcagtgcagtggccgttcaattgcagcatgtgttttggaggagacattaacccggctgactgtgtgttgacgcacctggggccagtcattcctgaggacccagctggagggggttccagggttttagggcagagaggttcagcccagcattaggcgtgttagtaagaaaaaggaatggaagcaaagtaagcgtgtgtaagagacagcaccgtgcagctaacaaagtcactcttcccaggaaagtaagtttttaaaaagcttcaatcaatcagtgcaatcacagaaatataaaaaatgtatatagaagaacggaaggaaccactgtcaatatttggatgtagtctaatagcaggtgtgtggatgatttgatttattttatcctcaactggctacttcccacccacccaacaatacacttagttcaaacacacaacttttctcttcacagggtcccagcggcctggtcggacccaaaggagaggtgagtgcccggcgactgttccgatgacaccatccatgggcgcctgctggcttcctgcccacctctgggcaaccaggcagccctgcagggcactgcccagatccgagatgtaaaaaagcttgctctggtcaaggctgggcaagacggctccgtgccggctgggaaagagcacgtcggggtggctctgggctcctgggctcgcccctgacccaccttcctctgttcctctgcagtctggcagtcgaggggagctgggccccaaaggcacccagggtcccaacggcaccagcggtgttcagggtgtccccgggccccccggtcctctgggcctgcagggcgtcccgggtgttcctggcatcacggggaagccgggagttccggtacgtcgcttttccggcttttccagctttcacagggttgagatcgtgttttttccggaaggaagttactttgcggggtgacggtgggaatgcctcaccgaggctgccgcccccatgctgacgaatgtgtggggtgaattccaggggaaggaggccagcgagcagcgcatcagggagctgtgtggggggatgatcagcggtaagtcagccacgtgcaccggctgcagcggggcccatccccgcctgggggtcccgtgcctggggctacacagaaagccttcgtgccactgctttccagccaaagtgagcccctagcactcaccccgcctgttagcccttgggggtccacgtccgccttggcgtctgcctgtcctctgcgctagaggatggcccacgctcccgccccggattcaaccagattcccagcacgcagcagacgccctaaagcctgctgaatgcaatgggtacaagaacagcggagtgtgcccctgtggctggcagggcaggtccctaaacacccccaagggcacttccttcaccttcccactcaggcttctcaggctccaaggggttgggggtcctttctagctccagcattcatcaccccaaagcagttaaaccattttccatcaatcagaaggaaaacttgcttctggaagacagcaccgtgtagatattttatgctttacgtaacaatacttctgatgatcctctctcgagtaaacgcctgcacccttgttttcccaaagaacaaattgcacagttagccgcgcacctaaggaagcctttggcacccgggtccattggtcggcccggtccagctggcccccctgggcccccaggacccccaggctccattggtcaccctggcgctcgaggaccccctggataccgcggtcccactggggagctgggagaccccgggcccagaggtgagtgtttgaccccatgacacggtcaccctgctgtaaaaatccctgagactgacttgttagtaggcgctgcttctggtgcctgccatgcgccctcaggggtaacccctggaacgtgggggcctctcatgttttggggcctagcgcagttaactccttggtaatcctgtgggaactggaacatttttaacatgtgatgtttttctcaaataccattagaacaatatttggcagggagggattgatttaaaatgtgacgaaggctgggcgcggtggctcacgcctgtaatcccaacactttggggggctgaggtgggcagatcacgaggtcgggagttcaagaccagcctgaccaacatggtgaaaccctgtctctactaaaaatacaaaaattagctgggcatggtggcacacgcctgtaatcccagctactcaggaggctgaggcaggagaatctcttgaaccctgaaggcagaggttgcagcgagctgagatcgcaccattgcactccagcttgggcgacagagcgagactccgtctccataaaagaaaaaaaaaatgtgaggaatggccgggtgcggtggctcatgcctgtaatcccagcacgttgggaggacgaggcaggtggattactggaagtcaggagttcaagaccagcctggtcaacatggtgaaaccccgcctctactaaaaatacaaaattagccaggcaaaacacagatgtaagatttgaatgacgcaattagagggatgtgaaaatgcccttaggtgaaccatgggtggaaaatcatttaaaacatgattacaaaatattaataaatactcaactgcttaataggcataaatattttgaacaaaactaaaatcccatttaaattggctgccagaggtcagggaggtggttcagccgtgcacggctcagcagcaggcataggttctgacggctgtgccactgggcggtttcactgtggaacatctgagttcacttacgcaagcccggcctcctgcacccctgggccgtgtgccagagcctggggtttatggctgcagacctgcacagcctgttactgggctgggtcttgtgggcggttctaacctggtggtgggtatctgtgttaaatacatccaaacacgggaaaggaatggtaaaaattgggtatgataatcttaagggaccactgtcacctatgcggtgcgtcgtccacctgcagccgtcctgcagtctaagactgtgtacaggtgggtccctctcgtcggaccccgtcaagccctacgcgtgtgacatctgtacttttctaaatgtttccacttcagtgaaaagctggcaccctgtttgttacaaaggttgatcagacaccgctgtggtgtggctgcaacagatactctaaccatatgtctgtgtccacacctcgtgacaggaaaccagggtgacagaggagacaaaggcgcggcaggagcagggctggacgggcctgaaggagaccaggggccccaaggtacgagtccacggccagcaaggcttcactgggtgacatctcttccgccatcttgtagctttatgtggggcgtgcttgggttatgaatgggtctcttttcctcttctcttggcaaagcagtcttagagacaagattaggaattgtctcaataaccactttaatacataaaagtttaatcggggctgggcgcggtggcttacacctgtaatcccagcactttgggaggctgaggcagacggataacctgaggtcagcagtttgagaccagcctggccaacacagtgaaaccccatctgtattaaaaatacaaaaatgagccgggcgtggtggcgggcgcctgtaatcccagatacttgggaggctgagacaagagaatcgcttgaacccgggaggcggaggttgcaggttgcagtgagccaagatggcgccactgccttccagcctggcgacagagcgagactccatctcaaaaaaaaaaaagtttaatcagtaagcagatcctcctggatctattttagctaagtcaatttggttagattctgtttaagctactcagtatctatttcagttaaagtataacagaattttctcttaattgacctgtgcatacgttgaatatttccatttctaatgtcaaaaataaatgctttgtcacggagggaggcagcgccaggatccttggcaaaggccatcccctgcccgcccctgtcttagcctggtgccttctcaaaaccaggaggccttagactccaaggatgtgtgtgtccagatgagaaggatcccgaacagtcttcgagaaggcacccgctcccacctctgcctgggtgccctggagccttctcctctcctctcctccacgcactcacactgctctctggatgccctggagccctctcctctcctccacccaccccacctctccctgggtgccctggagccctctcctctcctccacccaccccacctctccctgggtgccctggagccctctcctctcctccacccaccccacctctccctgggtgccctggagccctgtcctcccctccatgcacgcacgctgctctctgggtgccctggagccctctccccttctcccctccacgcacacacactgctctctgggtgccccatgctcctggactctcctttgctgacctagctctgcctctacctggtgtccaaacgcacaggggtcccaggccccagccacgtctctccgcctgtggctctgaacagcatctgtgttgcacttgctggtggacagcagcctcccggccgcaccatgcccgcaccatgcccacaccatgcccgcaccattctggactttgtcacctcatctcagtgaagggctctgacaccccccacttaggcggctgactccctcttccctcacacccaggcctcccatgtttccactgtcatcactcaccaaagccaccccacaaccccccactccgggccccctgctcactccaaatccactccttactcacacagcccccaccaaacccgcgtaagtcagagtgcgggtgtcctcaggacggctctgcacccctgcctggggctggccgcgcctggccttccccggacactcccgaccgccagccccgcggagagcctttgtgtgccgttccctcggcctccccacccgctgtggcctctccccaagtgaagagtgagcagatggaagagcagggcttgcccacagctggatgtcaagtccccctgctttcagtccgggctgcagctgaactcacctttctgctctgtcccaaggaccccaaggcgtgcccggcaccagcaaggacggccaggacggtgctcccggcgagcctgggcctcccggagatcctgggcttccaggtgccattggggcccaggggacaccggggatctgcgacacctcagcctgccaaggagccgtgttaggaggggtcggggagaaatcaggctctcgaagctcataaaattcaacgtgaggaagcaagtgacaaggacgcccgaagcacagtggacggtcatgaaggagcgggggtgtggcaggcgggtgacgtccaggagagggagcgcccctggctgcccctcggccgccgactggacgcgcgggccttgccagcgagcaccctcatcgggctgtcgcctgacagcatacctcaaaaggccctagctaataaacctgtaagcccagcatttgagagaaggtagggtgtgtatatataaaaggttgtgtacaactccacgaggtgaaaaatattcagtaacttgtttacatagcatttgtgtaaagactatgatctcatcccaataaaatgatatattaaaccttcagattaatgactggctacagagtaacaaaaaataaagaatttaatgtacagtaaattctctcccatacaaaggtctagtctgatgttttgtgtacaaactcacatctccaattaacagtatttattgagggtgactttgtattgcactaacgtctattgctattacctgttgtgattgataagtaaagccactcattgaaaaacccaattccaaacaccacagtttgtgacacatgaagtaatgaatgactcttggtatgaaaacgtggcatttaagcgtctactgtgacagtatttcatttgtggacaaaagtagctttaaagcaagtatctggaaaatttttagcacacaggtttaaaatggtcctgcacgttgcaatacagcagcacgtgactcagagtcatgacaagggggtgtgatataacgaatgaaataaaatttccaaactgtttttagttaacaatttaacttgttccaattgctaaaggggcatatttaaaaggtaaataagtaaaaagccgtgtactttttaagattaaagaaagtacaaaggatgtcaattttttaagttatcatgttaagaaaacatgatggaatcagagcattgagaaaatgcttactaattattactaattaattattactaattattaagatggcttcatccccaaatggtctaagaggacattcatggataagcatttgcgtctagataaatatttttacaaaatgtgctctcaaagtccctactggagtcccgtcagcttgagtcacgcccttttcgagtcagactagccgagcagagctccagggttgcagaaggcgtgcacaggtcacgaaggaatggctgttcaccccccgaggattcctgttcagtccgatcacttgatctccatcgaggggctgctctgtaaactcccctgtgcaggacaggtcaccaaggagtccggtctggtcagctttagccttcggccagttttaccgcaaaatacgctctcaaattcctgcagtgaagaagtgacggttaacatactgaattaactgacatgaaaactgctgtcttccaaagtgcaaaaggttcaaattaagagctaagtaaatgactttagaatacgctgttttaaggtgtcattcacaaacttgtgtcttacctcacaaggggatttatataataaacagattttaactttttttttttcaaatagcagttacactgtacatgtacttttgtttttccaatactcagaatgtctggccacactgtattgattttattgtggtaaaatatacatgacatgaacgtttcaaccgctaatgggccctagctaataaacctgtaaacccagcgtgtgagagaaggtagagtgtatatattaaaacgtttcaggccgggcgtggcggctcacgcctataatcccagcactttgggaggccgaggtgggtggatcacctgacgtcaggagttcaggaccagcctgattaacatggtgaaaccccatctctactaaaaatacaaaaattagctgggcgtggtggcaagcatcttgtgaccccagctacttgggaggctgaggcaggacaatctcttgagcctgggaggtggaggttgcagtgagccgagatcatgccattgcactccagtctgggcaacaagagtgaaactccgtctcaaaaaaataaatttttaaaaagtttcaacaattaacaagtcaggggcatctacccccaccccagggcgactgccttgccctctgcactgccacacactcagggttccaaggccagcaaggtggaggtgctgctcgctgagatggctctgtccttggggagaccctgccagcagggtgggggtgggctgagcttgctcctgtcacaccacctgtcttttacaaaaggcctcaattataatggtggggtcagtctcaacctcccgaaggagactgagaggaagagaggggcacaggcgacggcccgatgacaggcgccaaccaccacgggcagaatgtggaaacgtctacgggacaaatcattcccttttcaacaaatgaacggtgaggaagaaaggaagggggaactattacgggttaagatatatttaaaaactatcaaccaaatgtgatgtttggatcctgattcaaatgagctgaccgtagagacacctgtgggctcacgggagattctgctcagattcgggaaggagactcaggtgggtaataaggagtgaaggctttcaggaaggagactgataatgcggttgtgtttttaaacaggccttttctttcggaagatatatttatgaatgaaatgatgtctggaattgttttaaaataattcagcgggggtgggagggcgaggggataggtgaaacaagctgatgcctgaaactgagttagagggacctgggagttcactttctatttctgtgcagatttgaaaatttccataagttggttttaaaacatagcattctacacgattaaatccaggtttatacagtttttattgtggtattaaaatatagcataaaatttgccttttaagcatgtgtaagtgtacagtggagcagcgtgaagtccactcacagtgctgtgcagccgccaccaccttttcatcaccctaaacagaaactccgtacccattaaacactaactccacaccgctccggcccccagcccctggcacgtaccagtccactttctgtctctctgaatctgacggctctaggtgccttgtttacggaatcccgcagggtgtgccctgttgtgactggcttatttcactcagcataatgacctcgggccatccatgctgtagcctgtgtcagaatttcattccttttcatggctgagtaagattctgttgtgtgcttgtaacacatttgtttactcattcctctgctggagcacacttgagtcatttccaccttttggccactgtgaaaggtgctgccatgaatattcatagaaaagcatccatttgggtccctgtttcacctctttggggtttatgcttctctggtgattctatgttgaaccttctgaggagctgtcatactgtcttccacagtggctgcaccatttcacacccccagcggcaaagcacagggattctgatgtctccacatccttgccaacacttgctattttgcttttgtttttgtttttgaatagccatcctagtatgtgtaaaagtagtatctcattgggtcttgattcgtatttccctaatgactaacggcttggcgcatctttcatgggcttattggccatctgtgtatcttctctggagaaatgtctattcaagttctttgcccatttttcagttgtgctgtcttttttttggacagggtcttgctctctcaggctggaatgcagtggcacatccacggctcactgcaggctcagcctcccgagtagctgggactacaggtgcacaccatcacgcctggctttcaacattttttttctgtttttttttgtttgttttttgtttttttttttttgagaccgagtctcactctgtcacccaggctggagtgcaacagcgtgatctcagctcactgcaacctccacctccctgcaacctctgcctcctggggttcaagcaattttcctgcctcagcctcctgaatagctgggattacaggcacctgccaccacacccggctaatttttgtttttttagtagagacagggtttcaccatgttggccaggctggtctcaaactcctgacctcaggtgatccacccacctcggcctcccagagtgctgggattacaggcgggagccacggttcccagtctgtgtagtctttttgttgctgagttgtagtaactttctacttaattcaagtccaggaggacacaagcgccatgctgccatggatttaacttctgaaccacctggagtgactggaacattccacccatccacttttaagcaactttccaaccaagcaagctgccatttccaactactgtgtgcactcagaatctacacctgcatataaatatactcattttcttcccaattttttttttttttggatatggagtttcactcttgtcgcccagactggggtgcaatggcacgatctcagctcactgcaacctttgcctcctgggttcaactgattctcccacctcagcctcctgagtagctgggattacaggcatgtaccaccacgcccggctaatttttgtatttttagtagagacgggggtcacaccgtattggccaggctggtctcgaactcctgacctcaggtaatctgcccacctcagcttcccaaagtgctgggattacaggcgtgagctacgacgcccagcttcttcccaaattttaaaaggttttaggatgcaatttaaaatgaccccacattttgataatttcctatattctgacacctaaagcctacatataaaaaacacttgcctatttggcaagatagaattcacctttcaggacaattaaatgaaagtcagagcctgggccggctccggagaagttagaccctcggagctggtctcggactgctggggcgtcaccccttcagcaacccccgctgaccatggcagtatttcatgacgaggtggaaatcgaggacttccaatatgacgaggactcggagacatatttctgtccctgcccatgcggagataacttctccatcaccaaggaagagctggagaatggggaaggtgtggcaatgtgtccaggctgctctctcattataaaagtgatttatgacaaagatcagtttgcgtgtggagaaacagtgccagtgccttcagtcaacaaagaatgagttaaatgctaaggaagccttcaggaatccgaaccctgaacagctggaaatgagcccagatagaaacttcaaatgcaaagctcctggcttcgtggagacacagccatttgtgatttgctgttctgtaggcgtgttgtggattctttccatcaactgctgatttcatcttcaggaagcaagtccataacatgacgtatctggagtttgtgcttagaaccttaaattggaagcattcttaattatccatctaaatttaaaagacgataatttaaaaaaaaagaaggaaggaagaaaataatcatcctcagacataactaggcgctcgcaagatcttctgaactattttcacacagtgatgaggctagtcccggcgtctgccttcactatgaacagttgggcagaggcagggttgagttgtggttccatctggacccttgcagggcccgcccacgacccgtctcctgggagctggggcagctgtgaaagagaggagcagatccccttagtcctcctcagctgagcccaggccaaagacgtggtactgatgtcatcgcactctcaatctgcacctcaatccaaatgcatctatttgcaacagaacatatgtgaaatcgttgagttttaaaggaatttttataacatcaaaacattgagatgacaacgtcccaaagcagatactcatgttagatttgtgaacatgagaagaataacaacaagacgggtgcggtggtgaggggcgcctacggtcctagctactcgggaggctgaggcaggaggagcacctgagcccaagaggacgaggctgcactaagctgtggttgcaccgcactccagcctgggtgacagaatgagggcccctcgctgggaaaaaaaaaaaaagagagaaagaaaaagaaaaataataataccaacaataaaaaaaattttcttagtaagaaaaaagaaatagctctaactatgagtcaggaaaatataccaggaagttattaagaggaagaaagcggccgggtgcagtggctcacacctgtaatcgcagcactttgggaggccgaggtgggtggatcacctgaggtcgggagttcacgaccagcctcaccaacatggagaaaccccatctctaataaaaatacaaaatttgccggggtggtggcacatgcctgtaatcccagctactcaggaggctgaggcaggagaattgcttgaacccaggaggcagacgctgtagtgagccaagatcgcgccattacacggcagcctgggcaacgagtgaaacttcatctcaaaaaaaaaaaaaaaaaattacaagctatttaaaactgagaaacaatgaaagcattgtgtcctaacctgtgaaatgtttcaaaagcacaccaggacaaatttactataatgcattgattagaaaacaacatagacaaaataaactttcaacccaagataccagaaaaaaataaaacttcaagaaggaaataatagaaataaggttttgggataataaagataagagcaaattatgatggaaaaagcactaccactgaccccacataaaaaaccaacaaagtgaatgactgagccccagaaagactccagcacggcccaggccagaggggtacagcagaccaaggagctcaggtggccagaggtaaggaggcataaactcattaggacaaaaagaatggcttttctttttcaagatgctttatttttaaaacaggtcacaacacagcgttcggctcattctgccacgaacaagctacaaacgcttgctctgcagccgagaggccctccagtggccatgttcaaaaacagaatgaaaatccgtatgtaggccaggcgcggtggctcacgttggtaatcccagcactgtgggaggccgaggcgggcggatcacctgaggtcaggagttcgagaccagcctggccaatatggcaaaactccatctctactaaaaatacaaaaattagctgggcgtggtggcgtgaccaaacggcatgggaggccatgatcacaggctgctgggaatggatccaagagaggatgaagtggctcaggaggtacagacaagcgccgggcagccgggcagccaaggagagcagagaaatgggcggttgccagtacaggacacgaggtccagggagttctcacagaaggatcacgggagaagtcacagcgtgtccgcaggaaaggaggagagaagggacaggccagtccgagtctgcagcagggcctgacaacagacagcacgtgagggacagcgacaccggggcctgatgcagatggcagggagatgcgaagcgggactcaaccacctgctggtgtgaagaagggagggacagacaccacaagggaggccccaggagtggctggcaccttcagggcccccagcgtgcaggggcatctcacaactaaacacaaccagcgccccagacgccatcccgactggggaaaaagttgtagtgggcactattgagacagcaggcaaaatgtgaataacagtcttgcaccaatgttaaatgtcctgattttcatcgttgtggatattaaaaagtcaacacgggggccgggcacagtggctcaagcctgtaatgccagcactttcagaggccgaggcgggaggatcacctgaggtaagatcgagaccagcctggccaacatggcgaaacactgtctctactaaaaatacaaaaattagccgggcgtggtgggatgcgtttgtaatcccagctactcgggaggctgaggcaggagaatcgcttgaatccaggaggcggaggttgcagtcagccgggatcacgccattgcactccagactgggtgacaagagcgagactccgtctcaaaaaaagtaaacactgggccgggtgtggtggctcaggcctgtaatcccagcactttgggaggctgagacaggcggatcacaaggtcaggagttcaaaatcagcctggccaacatggtgaaaccctgtctctattaaatacaaaaattagctgggtgtggtggctcaatggtaatcccagcactttgggaggctgaggtaggcaggatcacttgaggtcaagagtttgagaccagcctggccaacatggtgaaacctggtctctactaaaaatacaaaaattagccgggcatggtgggccatgcctgtagtcctagctactcaagaggctgaggcagaattgcctgaacctgggaggcagaggttgcagtgagctaagatgacaccactacacttcagcctgggcaacagagcgagacgccgtctcaaaaaaaaaacacggaagtatttaagtataaagaagcatggtgtctgcagcttactatcaaatggatcccaaagatacctggagagaaactgggaccggcagggagaatggagcaaacccggacaggcctacaaagagctctttgtactgttcttgcaatttttctgtaagtttgaaattacaccaaaatttaaaattaccaacagtaaatagagccatctaaacccagaatgtggggcattctctagacaaccggcctgatctcttcaaagcctcaatgccatagttaataactgtgggggggattcttgtagctcaaagagcttgaaaactgtcatcaaatgcagtgcataatccatggctgggtgctggactgtggaaaaaaacagctatgaaagtcatttttagaacattttggctgggtgtggtggttcatgcctgtaatcccagcactttgggaggccagcctgggcaacatagcaagaccctattgctacaaaaattaaaaaactagtcaggcatggtggctcatgcttgtaatcccagcactttggaaggctgaggcaggaggatcacttgagcccagaagtatgagaccagcctgtgaaacatggcaaaaccccatccctacaaaaataaaattagctggtcatgatggcacacacctgaagtcctagctacttaggaggctgaggcaagaggattgcttgagcccaggaggcagaggctgcagtgagccataatcatgttactgcactccagcctgggagacagcaagaccctgtctcaaaaaaataaaacaaaacaaaataaacattaaaataaaaaaattaggcaggtatagtggcaataaaagaacattttgggcaaatctgaatagtctgtgcattagaggatatgaaaaagacttattatcttggggaggcatgatcatggcactgggattctgtggaaggcctgtcttggagatttatgtagaaatatttagagatgaaggttcgtgtctataattgtctttgaaattgtgcgtgtgtacaaagtaaatacggtaaatgttcattgctgagactgaagcatgggtgtacaggtgttcactgtaattcctatgttcactagaaaacgaacagaagtgaatcactgatggctgacgccgccctgccctcaccccatacttatctatcccctgcctcccgatgtccccacctgacgcccccagaatgccgagatcctgcttctctgagtcttccctctcagtaaacagccccatccacccagccaccgaggccaaaccctgacgcctttttcccatcacaacccccaactggtaccgccacaaacacaagaagccttgtgcctttcctcctccccagcgccgccccctggcagccatcgcccggcaagccacatcttccagctactgcagactcctggtttccactctcaccccagcccagctcctactccctagcatccagtgtcccccagcagcagggtgatatgggtcatgtcactcactgcccaaagactgccgaggcccccaaccctcaggactagcggtccaccaggccccagcctgccccggtgccctgcccagcaacactggctggcaggcaggcactcctcagactctgcagccggcaggtcctggctgccagctccctgtcatcattgggccttggttgggcgcctccctcgaccacccaacatcacccaatccaaagcagcccccgagtccggctggctcgcagcagcaccttccacccgcaaggccctgctcccactgtcttcacgtttactcgtcccctgcctccctccatgccagacatgcctctatcttgcgcagggtaccccagcaccttcagcagtgcctggtcacactggaaaagacctgctgagtgaaatgtgtaccaaaataatgtagagaaatcacttaaaactctcatgtattacgtcttcaaggacaaaaatatgcatccaagtaaaagggggcagtcactaaagaaacaattaagaacccatgtgtttcggctttttatgttctaattccccgaaaaaattgtgaactgacttgacctcagcctgtttcttggtgggtctaataatgtgacccagaagtaatcagattcaatgtaattacatttaagaaatattcagcaaacataatgtatgtaaagtatcatatccataaacatttggtctacttaatctttgactatacatacaattaacattttttaatttcaaaaattataaatgccttcgtcttgagtaaatcagatcaataatgatttactaatagatacacaaagccaaaacattaaagcattttttaaaacacaaaagctttattttatcaaaacaaatcaacagtctacctctaacaataatcttcaagagtaactgcattgtaaataaccataaacgatccgatcagaatacattcaacatagcatcgctatagaatgcaattaaatgtataatgtaaataaacaacttaaattatgcaactcgcaagatgtaaatgtcatgtggacacagaaaagggacagagacaagacaaactattgcctggcgctgaagagacgagccctcactcaacacagcccagctgcggggacctctctctagccccaccatgacgtagacacaggagcccttcttttgagatggagtctcgctctgtcacccaggctgcagtgcagtggtgctatcttggctcattgcaacctccgcctcccgggttcaacaattctcctgcttcaacctcctgagtagctgggactacaggcgccaccacgcctggctaatttttgtatttttaatagagacgggggtctcatcatgttggccaagctggtctcgaactcctggcctcaaatgatccacccgcctcggcctcccaagtgctgggatcacaggcatgagtcactgcgccaggcctgggagcccttcttggaagaggtccttgtttgttgcagcaaccttagtttgttctctagtcagactcctgcctgggtcaacagcagcaattccccaacagcttggaccaggtacaaagtcaggaccctgtggatctatttcactaaggtctgctcactcctagagggccaaagagccactgaccctggccactgcaacgctgaggccgggacctggaactcgggtcccccaaaggcagggcccaggaccctggaactcgggtcccctgaaggcagggcccagaaccctggaactggggtccccccaaggcagggcccagaaccagccctgtgactgacaccttcttccttttaggccactgaggggctgactgaactcctgcattcaaatcacacgtctagttccagccaaccacgatggcttgctgcaggccactgccacgaccacacagacaggatcacggcaggctggctgtcctgagggactgcatatgctggcgctaacacgccggctcctccctagtcacccagtccacagaagtatattcacccggtccacagaagtatattcacccggtccacagaagtacagtcacccggtccacagaagtatattcacctggttgacagaagcatagtcacctggtccgcagaagtatattcacccattccacagaagcacggtcacccggtccgcagaagtatattcaccgagtccacaaaggtatagtcaaccagtccacaaaagtatgttcacccagtccatggaagtatagtcacccagtctgcagaagtacattcacccagtcagcagaagtatattcacccagtccgcagaagtatagtcacctagtccgcagaagcatggtcacccggtcggctgaagtacattcacccagtccgcagaagtatagtcacccggtccacagaagcatagtcacccggtccacagaagtacagtcacccggtccgcagaagcacagtcaccggtccacagaagcatagtcacccggtccacagaagtacagtcacccggtccacagtatagtcacccagtccacaaaagtatagtcacccagtccacagaagtatagtcacccagtccacagaagtatatgcacccagtccacagaagtatatgcacccagtccacagaagtatatttcttattaacctgctgggcatatttgaagtccagatcagactatttgacacttatctgcatttttgtttctctttcttttttggggtgggtgggggtggggcagggtcttgccctgttgcccaggctggagtgcagtggtatgatctcagctcactgcagcctcgacctccctggctcaattgatcctccctcccagcccccgccccgagcagctgggactacaggcatacgccaccacaccaggttaatttttgtattttttagtagagatggggtcttgccatgttgcccaggctggtctcaaactcctgggctcaagagatcctcccacttcagcctcccaaagtgctgggattacagacgtgaaccactgtggctggccggtttttgtttttctattcttgcttttatccctttcacaagtttttctgagggcaaatatcatgtcctacacacccgtcagccccagtgcaatataccgtacacagcaggtgcccaatttgctatctgacaattgcctcttcacagttatttacacactgagtgtaacacatgtaggctgtgactattactttaataaatgacaagttatatcattaaagagcagagctttgctcatactggacttagtatttgatgttagattccaggaaacaaaggatagtttgagttatccttaggaaaaaggagggacattgttaagtaaaatttgtaaaattctgaaaatctacctggcctaccactaacctttttaagagaatctccatgtctttcctggatgtatttcaggaatgctgtggtccactgcagagttgtggccttgtcagtctcggcattgcagaacggcactaagagattcaactcatcacagcaaatgcggattctgcgcctatagtcaaaacccaaagtcatcaccgagagagaccggagcaaaacaaacatgtaaaaggaagcgtctcctgtagtacttgagggaaccagagctcgtgcatcctggccactgagtgccacggaagcgcctgtcaccacaggaagccccacggctttgccacggccttgtctacagaggcagccactgccttccagaggccagagcatcctcgggtgcccttggcggccccatgacccacaagctccctggagctttccctctttacttctcacgggccaggttcaagtctctagattagggatggctccaaagcccctgaaactggaagcaacattttgtgtctgacaccttcttccatttggaccactgaggggtccaaattgggcagataactctgtcattcaagactgatattacttgcccttcacgggctaaataccctaccaggaactcgtgcacagctttctccaaggggccctgattcagaaaggatcacggcccaacactctgttaatattctgaaacttggtctttgtagagataaacaattggagtcttgttattagactattttttaaacttttacatattacattcagtaacatgcaaagtcctaaacaagcagatactgagcaacttattcaatatggcccttgttactcaccttcacacccgtctatttagaactttaattagagactttgccagtaaaacagcagctggcatttactaggtgcttttggacttctagacattgagcgaaacactctttacacatcagctcactgaactctaaccacaagtctacgcagtagagctagaagtccaactttcaaactgtcaacgtacggtgtaaggctttccacatagcaggtactcaataaatgtctattaaataaatgtcggagcaaaatgcccttcataattcacagtagggtgaggaaggccctcagttagtccatgtgtataaaagtatcataaaaagatattagctagctttttaattttctttctttgggggatgggtctcactttgtggcccaggctggagtgcagtggcatgatcacagctgactacagcgctgacctcccaggctcaagtgatcctcccacacctcagcctcccaagtagctggggcgacaggtgtgcaacaccaccactactagtattgttggtttttctttagagacggggacttgctatgttgcccaggctggtttcaaactcctgggctcaagcaatcctcccacctcggcccacagtcatgagccactgcaccctgccccagcaagtttgaatagatccctttaaaagaaattgccatgccaggcgcagtggctcaagcctgtaatcccagtactttgggaggccgaggcacgtggatcacctgaggtgaggagttcgagaccagcctgaccaacatggagaaacccctcctgtactaaaaatacaaaattagctgggcgtggtgacgcatgcctgtaatcccagctactcaggaggctgaggcaggagaatcgcttgaacctgggaggcgaaggttgcgttgaaccgagatcgtgccattgcactccagcctgggcaacaagagtaaatctccatctcaccaaataaaaaaataaataaataaataaattgccttagctcaacattcaaccttggagcttcaaacctgagtatttgtctcactcactgttatttatttcctgaacttaaagcagaaactggtacacagtaccagtactcgatacattatgtagttaattaattatagattagggaaatattctatgaaaacccaattataggccgggtgtggtggctcatgcctgtaatcccagcactttaggaggccgaggcaggcggatcacaaggtcaggagttcgagaccaacctggccaatatggtgaaacctcatctctactaaaaggtacaagaattagctgggcgtagtggcgggtacctgtaatcccagctactggggaggctgaggcagaagactcgcttgaacctgggaggcggaggttgcagtgagccgagatcatgccactgcactattccagcctgggtgacaaagcaagactccgtctcaaaaaaaaaaaaaaaaaagaaaaagaaaagaaaacccaattataatagaaaaaaattaaccactcttaattctacaaagaaggataccacaaataaaatctacagacaaaaccacttaaataacaattttaacctcttccttcccagcaatcttaaaagaaccaggcaatagccaggagcggtggctcacacctgtaatcccagcactttgggaggccgaggcgggcagatcacgaggtcaggagatcaagaccatcctggctaacatgctgaaaccccgtctctactaaaaaatacaaaaaaattagccaggtgtggtggcaggcgcctgtagtcccagctactcaggaggctgaggcaggagaacggcatgaacccgggaggcggagcttccagtgagcagagatcgcgccactgcactccagcctgggcgacagagcaagactccgtctcaaaaaaaaaaaaaaaaaaaaagaaccaggcaaaacttgctgaactcaagctggctggtaagcagcagttaccaaaacagcctgaccactctcctcagaaaggcctgcagtcagggctggcccttagtggagtctgcaaacctagattcagggagttaagagtgcccccagaacctacactgtgcaaacgatatggctgacactgaacaactgctttccttctgggagactggactgtggttgcatgcatgggggcagtgcctacgtgacacgcccctggtctctagcgagctttcctggttggcaacacctcacccacgttttcagaccacatggctgggggcatgaggggcaacctgcctgactccacagggcgcgctcttagaagcttgcacctcagctcctgccttctccccacgcgcctttgctgatcgcacctggcatcctttctccatagtaagtcacagcctgagagtgactgcatgcggagtcccgggagtcctcctagtgagccagcgagcctgggcatagtctgggggatccttgatccatctgggaaagctaacgatgctcctacctgctttattccctctgaacgcagaaacggctaaggatcactcatctgtgataaccatgtatgactaaggtaatcatatatgagtcagcctgacaagcagtcacacgtattaccttctatctctttccattcggttatgcctctccctacgttgagaccttcctccctggggcccactctgggcctgctcccccaggtttgcctgtgaggactccgaggactgccaagcgccttgtgtggcggtggcaccttcgcccacattctgaatctctccaagggctcttcgctctacatttgtgtccaactgacgcattctactccgattcctcttcagtgcttgtttgcatagcgctgcttctttgcgaaagaagaaaaaagtggtttttaattttgtattcttatctcaattaatgctgaatacagttttggccttttcaatccaagatataaacattattgggtaagcagcacagagaaccgaaacacaaagagatgtactaatgcagtttttcagcatcagcagggaccatgaagcccaagcctattttatacaacgaaactgaacaagaatcaatcatcacactaaatacgttttccaagtgctatgcaaccaatatgacctcatccaaagcccctctttttaattaacaggtgttatctatgaatacagaaaacaagaagttgtttactttttctaaaggtcagaatggaaaaaaaaaaacaacaacaacaaaccacctggacatatttcctcccaaaaatattttctttatatacaattattctaagaacaagaaaaaaaaacaattattctaatatgacagtatttttactgcaatgctcagaacaaaactgcagcagcgtgtgtgtgtgccctcgccgcagaagtggctctcctccccaaagcaggaagaagtagcgtccgagcttttctgctgcgtgacaggctatgccacgtgtgcgtcagtggaactgtatccatcaaaggaccacaggcacgtgactggcaggcgtgctcatgtgcacgcgtatgccacacaaagcacccatttcagaaggatgatgaagctttcagcaggagagagaggaattcggtcgttttggtgatattttattccttaacctgagtagtcggcacagaggctgctttaatactcatctttgtatcttacaaatgtgaacatatactttggcataaaattttatagggaggaaaaggaaggactgacatgggagaaggcggtagctcttcctccccatcttgtcttcaccaactcttggaaagctaagtgtaaggagtgttcttttttcgggtcacttcacaaatcagtttcccagggaggaaggggctacgcaggtgtttcccagggaggaaggggctatgcaggtgtttcccagggaggaaggggctacgcaggtgtttcccagggaggaaggggctacgcaggtgtttcccagggaggaaggggctacgcaggtgtttcccagggaggaaggggctacgcaggtgtttcccagggaggaaggggctacgcaggtgtttcccagggaggaaggggctacgcaggtgtttcccagggaggaagggactatgcaggttagcgcagcagtgccttcagcagtgactttatttccaaactttccgaatcaccttacagcctctccctggcagccctaatagggtcctcctattagcagccacctatccaaaggctttcggcagatgttagatgactgcctcactcatcgagtataacataaggaaaataaaaaactataaagtactttcagtaacttgaaaataactgaaaatttatgtaagtctatcactttactgttaagaaaaagccctcaaacgcaacgttctcacaccaagattaattatgtttgagaatcagaataatgtttaaagcgaaaagacagggaagcgggtggacagacccctgagatacacagacacctccaagactgtttcacatgtgtacaaaccatctgtctcccctgccccccaaggccaaaatgccatcagccacagggctcagtcagaagaaagctcccactacctgctgcttcatcgcttacctcccactttaatccaaacttgctcaggcaaaactttgtttctactacctaacgtctgtttagtggattcaatttcttgctgataacagaaagaaaatgctctaggcaatccaatatcctggtgcttggcagcttcaagtacagaacatgagttactagaactctggaaaaaaatgaagcaacaggaattttatcaatatgtggcttactctcctctttactgcacaaatgaaatgcacttaacaaacatcaaaactactaacacgtaatttgaagaactttagttgcactgaagatttaaaaatattcgcataccacataaacactcaactttcacaggtatttttttgtttttgtttttttgtttttttttttgagacaggctctcactctgtcgcccagactggagtgcagggtcgcgatgtcagcccaccacaacctccacctcccaggctcaagcgattctcccgcctcagcctcctgagcagctgggattacaggtgtccgccactaccacctggttaattttcgtacggggtttcaccatgttggccaggctagtcttgaactcctgaactcaaatgacccacccacctcggcctcccaaagtgctgggattacaggtgtcggccttggcgcccggcttaaaaggttattaagctcactgaagggaaaaaaaagtacttgggacctaaccaaaataagttaaaatttacccatttaatacaaaagagcaaagcttcacaaatcatgttccctacctgtgtctgtgaaagattagaatttccactagtagagcaagcatttgtagtaaacagtgggtatgtaaattgcaaagcagtagttgtagccgcagttttatttttcactaatgctgtacatttgttttgttgctgaagaggaacattcattagttcagatggatgtcgaatgagagttaccaaactgccaagacaaaagaaagcccagaagtgtcagcaatacgtggcagacaagcatccaccatcccactcccatggctctggctagtttttccagacagcaacccaactctcatcctggaaatctctacacaacaattagcaactatcgctgctgtggaagtcctcctcttcctatggaggaaaagcaaaactgcgccacctccctgctctcatcacatcctgacaccaatctcacttttgccatcctccagtgtgaccacgatgggcaactacaggctgggatgagcagaaaactgcggacgcagccccttccacagccatccctgagggtcgccaagggggcggctgcaggctggagcctcattttagagctcaaagcctgcaaacccccgtcgggccttcctaggcttccctgacatccaagagtgccacccggagcacatggttcccaggaattctgcgcgctcggccccactccaggcggggccactgagggagggggtgtttagtttctggaagtacctgctccccggggcccgcacagcgcacacagcctttcggggcggccccagacccggtgaggtccgcgccctgtgccgccgggagggcaggctgggggcgtgcacagcgagggccccctttgcctccgccccggccccggccccggcctcggcctccacccgggccccgccagcccccggccgccgggcacgcacttgttgagcgccccgcccggctcggggggctcggggccgcgcggcgcgggcggcggctcggcggggatgctgttgaagcggtcctccaggcggacgcgcacggccggcttggcccgggcctcgggcgcgccgtcgggtccagccgcagccgcagccgcgcccgcgccctccttggcggcgccgtcggcccgggccctcgctccgtccccgccgcccgacgtcttctccgccgcgcccgcctcgcttagcagcatcatgcgcagctcctggaagtcgatgtggcccaggcagggcgcgtcggccgccagcgcggacgggcacagcacggggtacacgggcgccgcgcccccctgaccgcccgccgcgaagccgcccgcgcctgcgcccgggcccgccgccgccagcagcgccgagttgaggcgcgtctcgagctcgccgtcagccgccgcctccatgtgcgagcagaggatgtgctgcagctgcgtgtactccacctccgtcatctccaccaggctcaggtcggtggtcgtgaagctcagccccggctcgcccagcgccgcgtccccgccgcccgcgccctcgacggccgcctcgccgcctgccgcgcctgcctccggcggcggctcccgcggtccggggcccgacatggcggcgcggcgcggcccaacggcggcgagggcgacgcgggcggcgggcggcgggaggcgggaggcgggaggcgggaggcgacccccggcccgagcactactctgcgccggccacagccggcgcgccgttgggggagggaaaaccgctgagtgccgcgcacagcgcctgcgccgccccgccccgcaacggcaaccccacccctgcgccagccccgccccctccgttacccgccgccgccggccccgcccccgcccaaccgcccgcacgcccggccccgccccacgtcggcggatgcttgcgcggagggcccgcccccacggcccagccacgcccccacagctaggccacgcccccagctcaggccacgcccggttcccagccacgcccctgctgcccggccactccccgctgaggcccggcgagggcggctgcgctggaatcagcgtgatacctacgcggtgacaccctggggagaagccacgtccgtgcgtgcacgtgcgccccattacagcggcaggaatgaagacgttgtcaaaacagctccctggacccacagtccacagtgcccaggccatccgcttcatccgcgtaaaatgcgcagcgcatggccgggttctgtggctcatgcctgtaatcccagtactttgggaggccgaggcaggtggatcaggaggtcaggagatcgagaccagcctggccaacatggtgaaaccccgtctctactaaaaatacaaaaattagctggacgtggtagtgcgtgcctgtaatcccagctactcgggaggctgaggcaggagaatcgcttgaacccgggaggcggaggttgcagtgagtcgagatcttgccactgcactccagcctgggcaacagagccagacttcatctcaaaaaaaaaaaaaaaatgcacagcgcgacggtggtggtacattcccagcgctgggcccgcctccaccgctgcattcaccaccggtctcctgtagcagtcagcacactgcccctcccccgcctgcagccactaatcttctgtgtccaggagtttgcctaggctgggccttccctgttaagggaactatgcaatatgtggtctttaagagacttatttttgcaatcttgaaataattcctgtacttaacctctcacccacattcccatctcactcagtggttgtctgttctctgtctaggcattaggacacttaaaggcctgtgacttgcacatcgtcttctaagccgggtctgaatctttcgctcatttcatcacagtttagacacagaccaatatattacaatgattcaacgatgggctatgaaagctcagccatgcaaatctaaactcacacatgtatacatgaaaataatatatcagttttgggcaaaacatcaggtttcagaaaacactaccaaggaggaaagcaaggacttaaaactctcaaggacatggcaacagaagtcgtctaacgtaaaacagagagggaaggctaagagagtgagcagagcatcagtgagctgtggggccgcttcaagcagtgtgatttgaagtcccctgggggtggaaggatggggagaaagacattttaagaagtaatgattgccaggtgaggtggctcacgcctgtaatcccagcactttgggaggccgaggcgggcagatcccttgaggtcaggagttcgagatcagcttggccaacatgatgaaatctcgtgtctactaaaaatataaaaaattagccaggtgtggtggcatgtgcctgtaatcccagctactcaggaagctgaggcagaagaatcgctggaacccgggaggtggaggtttcagtgagtagagattgcaccactgcactccagcctgggagacagagcaagacgctgtctcaaaaaacaaaaacaaaacaacaaaaaaaaataatgattgaaaagtttttttaaaactacaaacctacagacccaagaagtttaacatacctcaaactcaagaaacatgaaggaaactacaccaagatggaaagcaaattgctttatttatttatttttttattttttgagatggagtcttgctctgtctcccaggctggagtgcaatggcacgatcttgactcagcacaacctctgcctcctggattcaagtgattctcctgcctcagcctcctgaatagctgggattataggcatgtgccaccatgcctggccaattttttgtatttttagtagagacgggattttgccatgttggtcaggctggtcttgaactcctgacttcaggtgatctgcccaccttggtctcccgaatgctgggattacaggcataagccaccgtgcctggcctcaaattgctttaaatcagtgaaaaatcttaaaagcagctgtacacacacacacacacacacacaagacattgtgtacagaggaacaaagataagaatgattacaggccaggcgcggtggctcacgcctgtaatcccagcactttgggaggctgaggcgggcggatcacaaggtcaggagatcgagtccatcctggtaaacatggtgaaatcccatctctactaaaaataaaaaaaaatagctgggtgtggtggcacaggcctgtaatcccaggtaactcaggaggctgaggcacgagaaccgcttgaacctgggaggtggaggttgcagtgagccaagatcacgccactgccctccagcctagtgacagagcgagagactccttctaaaaaaataaatgaaaagattgcagtgattgcagacatttcttcaggaataatgcaagtcagaacagagtggaatcacacctttgaagtgctgagggcaagggagaagctgactgatagtgtcaggcgtctgtattcacaggctctgcgtctgtggattcaaccaaggatcaaaaatactcagaaaaaaattacttgcaccgaaatgcacagactgctcttccttgtcattattccttaaacaatatggtataacaagtattcatttagcatgtacatcgcatgaggtattataagtaatctcgatatgtatatattttagaaacagggtctcgctctgtctcccaggctggagtaggataatacggttatagctcactgcagcctcgacctcctgagctcaaccaatcctcctgcatgactctgccgagtagctgggaccacaggcacacaccaccatgccctgctaatttttattttattttattttttgtagagatggtatcttactatgttgcccaggctggtcttgaactcctggcctcaagtgatcctcccacctcagcctaccaaattacagagattacaggtgtgagtcatcacgctcgccgctacagatgatttaaagtgtatggaagaatgtgcataggttatatggaaacactatgacattttgcataagggacttgaacattcgtggattttggtacccatggcaggtactggaaccaatcccccagggatactgaggaataactgtagttctatgcccagcaaagatatttttcaaaaacaaaggcaaaataaagacttttttgcacttacaaaagctaaaataatccatcactagcagacttgcagtacaagacatgttccagaagtccttcagacaaaaggaaggtgagactggatagaagtcggggtctccacagaagaatgaagagactggacgggttaaagctatttattacgagccttaccacaaccactgcaatacagcaacaaagggtgatggctaataaatcaataaaggagagaaaatggaatcagactctcaaaggggcagaaagtgagatatgattgtgccactgcacaccagcctgaatgacagacctcacctctaaagtaaataaataaatgatacaaaaattaaaaatgcaagaggcagaaaaaagaaaaatagaacaaagagcacacgggacaaatagagaataaatagcaagatagtagatttaaatccaataaaaaaaaatcacatgagatgtaaaaggtttaaacacgtcaatgagaaagcagagaccagaatggataaaaagtcagaacttggaggccgggcgcggtggctcacgcctgtaatcccagcactctgggaggccgaggcgggcggatcacaaggtcaggagatcaagaccatcctggctaacacggtgaaaccccgtctctactgaaaaatacaaaaaattagccaggcgtgggggcgggcacctgtagtcccaggtactcgggaggctgaggcaggagaatggcgcgaacctgggaggcggaccttgcagtgagctgaggtcccagctctgcactccagcctgggcgacagagtgagactctgtaagtcagaccttggagtgcccgtaagaaactcattttaaagagaaaggatggaaagtgcgcacctccctagcgctgtcgaaaggcagctggaataggcatataaacactaaagtcaatttccaggaggcgggtctgaagaaaaagaagaaaacaaatactaaagtagatttcagagccaagaattttgccagcgattctggtcatttcatagtgaaatagggggcagaacattttcctgattaaatgcatctaattagaaagcttaaaaatacatggagcagggccgggtgcagtggctcacacctgtgatcccagcactttgggaggccgaggcgagcggatcacttgatgtcaggagttcgagaccagcctggctaacatggcaaaaccccatctttactaaaaatacaaaaattggctgggcatggtggtgtgcgcctgtaatcccagctacttggcaggctgaggcaggagaatcacttgaacttgggaggcagaggttgcagtgaactgatattgtgccactgaactccagcctgggcaacagagcgaaaccctgtctcaaaaaaataataaataaaaaataacaaaacaaaacaaaacaaaccatggagcaggccgggcgcagtggctcacacctataatcccagcactttgggaggccaaggcgggcagatcacaaggtcaggagttggagaccagtctggccaacatagtgaaaccccatctctactaaaaatacaaaaaaattagccgggcgtggtggcgtgaacctgtaatccagcgactcgggaggctgaagcaggggaattgcttgaaccagagaaatggaggttgcagtgagctgagattgtgccactgcactccagcctgggcgacagaggaagactccatctcacaaaaaaaaaaaaaattctgggcacggtggctcacgcctgtaatcccagcactttgggaggctgaggcaggtggatcacctgaggtcaggagtccgagatcagcctgaccaacacggagaaaccccgtctctacctaaaaaaaaaaaaaaaaaaaaaaaaaattagctgggcatggtggcgcatgcctgtaatcctagctactcgggagcctgaggcaagagaatctcttgaacccgggaggcagaggttacagtgagcagagattgtgccattgcactccagcctgggtgacagagtgagactccgtctcaaaagaaagagagagaggagaaagacagaaaatcagaaaggatgcagaagacctggacaatgccatcaaccaacttgctctagttgatgtttatagaacaccccaaccacccacatcagaatacagtcttttcaactggataggtaacatctaccaagataaaccataatttggaccataaaatatgtctcaataaatttaaactttagaaaaatatgtcctcaaccacgactgaatttaatttcaaatctaatgtaaagatatttgagatattgtaaatctccgaacatttggcaactaaataatacatttctaaatgtctcacgggtcaaagaaatcaaaagggaagttataaagtatttagaaatgagcaaaaatgaaaacgacaacatcaaaattcatggaatatagctaaagaaatacttagaaaagtatagcaatcacaaaagaagacaagtatcaaattattaatctcaacttctgcactgttgaaaaggaagagtagaaaaggaagagtaaagtaagcagaactgtgcgtcagtttccattgtatttctaaatacaataaaaaacagaaaaaccgtagagaaaagctcaaatgaaaccaaaggctggccgggcgcggtggttcatgcctgtaatcccagcactttgggaggccgaggagggtggatctcctgatgtcaggagttcgagaccagcttggccaacatggtgaaaaaccccgtctctactaaaaatacaaaaattggccgggcgtggtggtgggcacctgtaatcccagctactcgggaggctgaggcaggagagttgcttgaacctgggaggcagaggttgcagtgagtggagattgcaccattgcactccagcctgggtgacagaacgagactccgtctcaaaagagaaaaaagaaaaaaaactgaaggccggttctctgagagaagcaataagatgtatcaacctctggccagactgagcaggaaaaaagagaaaaacaaatgaccagaatcaggaataggcggtgacagcagtaaagattctaaagatactggatgggtgcagtggctcatgcctatactcccaacactttgggaggccagggtgcacaggccgcttaagcttagaagtttataaccagcctgggcaacatggcaaaaccccatctccacgaaaaacaccaacaattagccgggagtggtggcacatgtctgtgattccagctacttgggaggctggaggtgggaggatcacttgagcctgggaggcagaggctgcagtgagctgtgatcatgccactgcactccagcctgggtgacagtgagaccctgtctcaaaaataaaatgaagaaaaaaagcttctgtagatattgaacgtatattaaggggctattatgaacaactttatggcaataaaatcaacaacttagacaaaatgggcaaattcctcaaaatacataaattacaaaagctcactcaagaataaatagataactttattttctctatatctgttgataaaattgaactggtaattaaggaccttctcataaagaaaatgcctctaacagatgtcttcacgagctaatcctactaaacatttaaggaagaaataataccagttctattggtaatacgaactcttccaagaaactgaacaggaggggatactttctaaagcattctatgaaacaaacataactctgatatcaaaaccagacaaaacagaactacagagcaatatctgacaggagcaaagatgcaaaagttatttttatttttatttattactttaaaaaaaagtttcaagagacagggtcttgctctgtcacccagactagagtgcagtggtgtgaccatggctcactgctgcctcaatctcatgggctcaagcgatcttcccacctcggcctcctcagtagctgggaccacaggcatgccagaatacctggcaatttaaaaaaatttttttgtagagacaagagccttgctatgttgcccaggctggtctcgaattcctgagctcaagcaatccttccacctcagcctcccaaagtgttgggattacagttgtgagccaccatgcccagcccaaaattctttttttttttttttttttttgagacagagtctcactttgtcactgagactgaagtgcagtggcacgatctcggctcactgcaacctctgcctcccgggttcaagcaattctcctgcctcagcctcccaagtagctgggaatacaggcacccgtcaccacacctggctaatttttgtatttttagtagagacaggtttcaccatattggccagggtggtcttgaactcctgaccttgtgatccacctgcctcggcctcccaaagtgctaggattacaggcatgagccaccccacccagcccaaaattatttttaaataatgttagccctgtaatcccagcgctttgggaggctgagatggacggatcattggatgccaggagttcgagaccagcctggccaacgtggcgaaatcctgtctctacaaaaaaatacaaaaattagctgggcgtggtggcgggcacctgtaatcccagctactcaggaggctgaggcaggagaattgcttgaatccgggaggcagaggttgcagtgagccgagatcgtgccactgcacttcagtctcagtgacaaagtgagacactgtctcaaaaaaaaaaaaaaaaaaaaaacaaaacttagaaataaatttgatgaaagatgtaaaagactgtacactgaaaactacaaaatactgttgaaataaattaaaaagatggacaaatatagagatatactatgttcatggattggaaggttcgatagtgttaagatgtctgttattcccaaaactgatgtatgcagttccaataaaaacccagcagtgtcttagtccatttgtgctgtcataacaagacaccttagactgggtcacttataaacaacaaaaatgtattgctcctagttctggaagctggaaagtcccagatcaaggcaccagcatatgtgatggctgatgagggcctgttccgctcagatgctgccttcctgccacatcctcatgtggcagagagagaaaatcagctcccccaggcctcttgtaaaagggcactaatcccattcatgatggctctcccgtcatgacctagtcacctcctaaaggcccctcttcttattttttatttatttatttttttgagatggagtctcgatttattgcccaggctggggtgcaatggcatgatctcggttcactgcaacgtctgcctcccgggttcaagcaattcttctgcctcagcctcctgagtagctgggattacaggcacgtgccaccacgcctggctaatagttttgtattttcagtagagacagggtttcaccatgttggtcaggctggtcttgaactcctgacctcaggtgacccgcccgcctcggcctcccaaagtgctgggattacaggcgtgagccaccgcacccggccattgttttaaagacccctcttcttaatgccaccacagtgcagattaggtttcagtatgaatcttggagggatacaaactcagaccgcagcaagcagggttttttttctttctttctctctcaaattcttggaaggttgagcagggcagggtcaccaggcctgccggcaactgctccccttcctctcatcctcctgtagcttcttggactcctgggccaattgatttttctgttccgtgatgtggagtgatcaaagctggttctgggttttctggagctggatctttgattgcctttgatttaaaagcattggtaaccgtttctcacgggaaagaggcgctgataattcatgcaaatgagcatcaatgggcaaaattcaaccaagtgcctctggaaccaaggctgccattgaacattctagtaaaaatggggtggaggcttttgcccaagtgctctggataatctgggaaaagaaaatggtgagtcagtgctttattttatttatttatttatttatttatttgtttgtttttgaggcggagtcttgctctgtcacccaggctggagtgcagtggtgcgatctcggctcactgccacctctgcctcctgggttcaaacgattctcctacctcagccacccaagcagctgggattacaggcacatgccacgatgcctggctattttttgtatttttctggtagagacagggtttcaccatgttggccaggctggtctcgagctcctgacctcaagtgatctgcctgcctcggcctcccaaagtgctgggattacaggtgtgaatcaccgtgcccagccgaattttttttttctttttttttctttttagatggagtctctgtcacccaggctggagtacggtggcacgatgttggttcactgcaacgtccgcctcctgggttcaagcgattcttctgcctcagcctcccgagtagctgggattacaggcacgtgccaccatgcccagctaatttttttagtagagacggggtttggggtttcaccatgtgagccaggatggtctcgatctcctgacctcatgatccccccgcctcggcctcccaaaatgctgggattacaggcatgagccaccgtgcacggcctttttttttttttttttttaaatagaggcaaggttcaccatgttgcccagccttgtctccaacaagctcaagggattcacctcctcacagacagtgctcccacaggcgtgagccaccacgccccaccttatttatttttatgtatcttaacttccaaggtggatttatttaaaggttttacaataactatgtccaggctttaggctcatgggaagtaaatgaggacacctttttcccaagaagaatttctttaaaaccaagcacattgctaaataacaacattatatttggcaaacaataattggcaacaaaataagtttattattctgcccaagccagtcccagatgctgtttcttaaccaagatacaaacaaattttgctgtagcaagtctagaccaattttatcaaacatgtctttggttagatgtctagtttcatttaacgttttgaaaactcatttgacagccagtcaagtccctcatctacaccagctccgtgttgcacaagtggcttgaacataccatgtcctgttaggaagagactgaagagctggctggctcatctgtcgtcacactgatggcccgagcgctgggcaaaccctgtttgtttgcagagagcagtggcgctgcgtctccacactcaccggccagaagccttttctgcagcgcgtccgccacttcccgaattctttcatgatcgttgctatctaccagcaaaagaaaaccctgggtattctggaagtaatgcttccagagaagcctaattacatcttgaccatgaacatcccacaccatgaaacaagtgttctctttttgagtcagagtctcgctctgtcatccaggctggagtgcaatggcgcaatctcagctcactacaacttccacctcccgggttcaagcaattctcctgcctcggcctcccgagtagctgggattacaggagcccaccactatgcctggctaatttttgtatatttagtagagacagggttccaccatattggccaggctggtcttgaactcctgaccttgtgatctgcctgcctcggcctcccaaagtgctgggattataggcatgagctaccgtgcctggcccaaaacaagtgttcttatattctactctttccatgttaaaaccaatggcaggaactgtggtgagtacctcccctaacttcagtttatacacaatgtataggcagcatccaatcgaaccgtccaaatgtgcatctgcttcttgctgaagaggcgggagaagagagaggagatggcggggaccatgggttcgtggcacttgtgatgggcagaagcagaggggcttggggggccctgtgctttcttctttcatgcttccaggcaaattgaacaagggggaagagaaagaactgaggaagaaagagggaggcagggacatctcactggcccatgtgctggtgaagctgtagacaggaattagcaggacgaggacctgctggtgatggacacagcagctccagctctcgatgctttaaatgcctggcttggagtctgaaaaaggaacctgaaagcctctatgactgccttaaagtaagtccttatctcctgtagccatggggctgagatttctgcaaagcaaacctgaagcctagtctcctggatgatttaattacagcctaaactgcagtttcgactttgcagtgcctcttttgttaaagttagggaagttgggaaagaatgggaacctgacgttgcaatgggggcatgtgggcggcaagccacccaggtgccgaggcaagagaccgagggcacgagctgttccagtgtaataaaatatataaaacaacaagagttataccagatacagatcatagacatgattatatatgaatatctttcatcattagtttgtagcaattactctttataatgcttgctctataatcataatctaggaaaaaccaggccatacagagacaggagctgaggggacatggtgagaagtgaccagaagacaagagtgtgaaccttctgttacgcccggacagggccaccagagggctccttggtctagcggtgacgccagcgtctgggaagacgcccgttgccagacggaccgtggtctagcggtagcctcagtgtcacggaaaaacacccgctacttagcagacggggaaagggagtctccctttccccgggggagtttagagaagactctactcctccacctcttgcggagggcctgacatcagtcaggcccgcccgcagttatccggaggcctaaccgtctccctgtgatgctgtgcttcagtggtcacgctcctagtccgccttcatgttccatcctgtgcacctggctctgccttctagatagcagcagcaaattagtgaaagtactgaaagtctctgataagcagaaataatggcgtaagcggtctctgtctctccctctctgtctctgccttggctgccaggcaggggagggccccctgtccagtggacacgtgacccacgtgaccttacctatcactggagatgactcacactccttaccctgccccttttgctttgtatccaataaataacaatgcagccagacattcggagccactaccggtctctgcgcattggtggtagtggttccccgggcccagctgtcttttcttttatctctttgtcttgtgtctttatttttacactctctcgtcaccacacacagggagaagcccaccgaccctgtggggctggtccctacaggggcatgtgggaagatcccagtgaagctgaggaccacgagccctgcaagtccattgggatctgccggtgaactccgcaggtcgtctttgaaggcacatgtggctcttctgccactgcctggggagctgagacccctttgcccaaagaccctcaagtgccttccctagggagctgccctgtaaggtgccgccgtcctgcccgggactcaccaccacctctgtgttccttctagacctagatccagactggagttccagcaggccccaaaagagaaagtgtgaggtgtggcctacaaatatgtttccctacgaaaacctgcggaaaatgtgtggaaatcgatgttgagagtgcgggatctgggtgggaggaatataagcttgcgtaagtggacagggactcagatacgagattctggatttgatgcgttggagggaacggctgggagtgacccaccccccacccccattttcttcatcagtcaccgaaactttcgccccacaggtagctgaccctaaattcagtgaaatccagaactttcctggcacactggagaggacggcagaacgctgggatggatttatcgtgcaagaccagcttgatgtccttagggcttggaggtcaccccttcacgaggattgtgaggagtgaattcatcggggagccccgcaccctcacctgcaccctcacccccacccccacccccacccccacccccacccgcacccccacccccaccctcccccccacccgcacccgcacccccaccctcacccgcacccccaccctcacccccaccctcacccccaccctcacccccacccccaccctcacccgcacccccactcgcacccgcacccccaccctcacccgcacccccaccctcacccccaccctcacccccaccctcacccccacccccaccctcacccgcaccctcactcgcaccgcaccctcactggcaccctcacccacaccgcacccacacccacatcggggaagagctccatgatcattcttttctgtaggcgaaaaactgcggcgggaactgctgccatgcagctgggctcccaatgcagtggggatggtggcgctctgggctggcgggagctatcctgccggacgtgattcccagcacagccgtgagcggcagcagaggcgcagtcatctgacccacatagttcctgcgttgcctgatgggcgcagcttccctagaactgaaaaaaaaggacatcctgccaaaggcgtccccgttctgtgctggcagaaaggctgtaggtccgagagcaggagtcctgcgctctgactggaagccccaacacagagtccggggccctcggccaagttccagactctggacagacccaggcccctggaatgaaggacagactgagtctccgagaggaaggggccctgctaaatgccaaaaacatgcagctaatcttcccaccgccccttcccaaaggaatcttcctctgtttatcaggagtctgtgcaacgggaatgggaaataatcaggccttttaggaattactagaccctggagctgaaaggacattcatttcaggaggcccagatgccaggcagagctgtggtttatggaggcggacgacggagttggttcaggttttcctctgaggaggcccagtgagcctcccggcctcctgtggaacagacatactcagccaatggcagggtccccacatggtcccctgagccctggagtgaggtcggctgggagcagcagagcagccggaggaggaggagcaaaccccaggccacagcgtgctcctggagggaccccgattttgtcaaaatttagatgcagagagaaaaagattaaggaaaataccaaattaacgacagcagtgactgctgggtgtgacgttttgggcaggcttggttcttctcccttttgctaggtgtcccacaggaagacggacccagcatgtggggacctgcacccagccagtctcgccctggctcagcctgttcactggcgctgccctgccactgagggctgaggtcactgtccgtctgggcatgtctcatgtggtctttccttttctccccttctggttaggccccctgagctcagccacagccacgatccccactgccgcctcctccctgggactcgctgatgcctggtgtggggagggtgctggctgctttgggtgttaccccccgttggaggcccccgtgccgagttctcgagtgagatggctctttccattttcccccgacagctgcctcggcctctgtgctagaacagggagctacagctcagtgaccctgtggtgccttgtgggcctgtgggtgccagggctccggggcctgggccttttcctgcttggtgtggctgaccgggacgcggccgaccccaggggcatactggagctaggtcttcctcgccatgtttccacagtgagccctttggctgcacaggtcacggtctggagctgttggaggaggctgctcagagctgttgctgccccaccagacacttggccaaggggcctgcaccggtctgcgcgggaacgtcccaccggcgtctgctcatggctgggctgtggacccatacgcttgttcggaagccaagctctggcccacaggcgaccagaggaagctcgcaggccaggcgccagctccccgagcctgtccctgcagccgcgctgtgtgcaggcacgtgggccaccgcgtctcctccactggcactgctgggtctgggccgccaagcccacctgcccacctgcatcctcagcagcagcacgccccgcagtcggcgggtgcacactctgctgcagcctggatgggctggggcctcggggctcactccccaaccatgagactccttcaccgcagttgaggctgttgcagtggtctcgggctcccactcagccccaggagagggtctgaagggggtgagtccctcctcccgaccttcctgcccatcgtctccagagctggatggtgctgggtccccacagggagcgagacagctgccccgtgacggaaggatgtggggacccgcacccggccggtctcaccctgggctcagcatgagttcagggaggggtccaaagggcactcctgcccacgcccaggcaaaccagcaacaagaaactgggtggccagggcgtccgtgcacgaccccaaacttctccgcgttagaaaaaggctgatgaagacccgagacagaaacttcctgtagctgtttattctactgcgagtaacaaaacctaggtcgttccatgttctcatgtacagtgatataagcctccgcaatataaaatacaatgtacaggaatctctatcaagtaaactaaagaaacacacttgatttttacatttgtgtatttaaattagaaaaatttgctttatatgttaaacaaacaaaaccttctcatcgtactagatgttggaacgtgacacctactttaatgtaatttaacctatggacacttggctttcaacaccaaacatctcaaactgatacattctcaatgttttcttaacttaaaaaatctgtgctataaagtgaaaaatctgtagtgacgtacaatggaataacagactccaaagaacaagtgaagttctttaattttacatctgtaaaagtttatgaaaatataaaaaattatcaaagtgtatttgtacaaataaattagccagatttttttacttcacacttcagaagtactcgaaaaatacacgacaagcaagagactgtttcacagtgaacagcttcctgtctcatttgcagttcttgagctagtgatcactagttcccgtctcagactttacacaagtcttgttccacgttcaaggacaaacttttacatgtatcgtctgacaaataccagtttggggccgagcgtacttttcccgggatacagaagaactgctcagaaggcgaaactggaccaacaaaactcctgattattcaaatcaaggactcctccctgcccccaaagtacacttaattggtttgttactttttttaggctggtaaaacttaacatttttcaataaattgttatttaaaatgcaacaattatactaggacagatgttgctttaaatcatgttttggaaaaaattgataaggtgatatataaaatctgagcacgctaagaaatgtgtttctgtttcccagttgaaaattgtaattccaattttatgacaaaagaaagatgcatttgtaaggtttgtgtttctcaagactccagatacaagctactaagacttctcccgtagccgcagggtggacgcctgcaggtcacgcccacaccggcctccggggcggcggctaagacctgtaaaagcagcttttggaaacacaaacggatgagatgtcagtgaaggtatggctctagggtccaacgaaactcccttaaaatttacaataaagttattggaaaagataactatgatctgaaaagcaatatgctccgtaggcaatttcccatttcttttaattttaaatggaaatattaaagtttagtttttttaaaaaagcatcagaattgtaaagatgtgaaatcttgtaagaaaccatttacacaaaattacagtaatgtttaagtccagaatattctatcctgaatctaagatcgtggctatttcaaaagctatttgttcaacgcatcttacgaacgtggctttaaaaagggtctctgcccggccggggcgtctaggcctgcgaggcggtgccagcgtcggaggccctcgaggcctcgggcttcgggtcccgagcgctctctttgctcttgctccggtccttgcggtcgcggccccgctccctgtccctggccttgtctcggtcccgctctctgctccgggaccggtcccggtcgcgcctccggtctcgctcgcgctctcggttcctgctccgctcccggctgcggtcccactccttgccccggtcggcctcgcgctctcggtcgcggttggcgctcctctcccggtttctgtcccagtcccggctggagtccttgtcccggtgtcggtcccactcccggggccggtcccagtcccgctctcggctccagtttcggccgcgctcgcgctctctcctcctgtcctcggacgcccggccctgggcgtcgggctcctccagcggcttctctttgggccccacgtcaaaccgctctctctgcctcccttcgaaagtctggtttctgtattcgtggcctttcccctctcggaagtcggccgatgcccactgtccgtcggcctcggggccctgtccgggcgcactggaggagagcgcggagggcggcccggcctcctcccagcggtccttccggtgctgcggggggtggctgggaagctccagcaggggcctggggcccggcttcatcacctgcggggcctggccctggaagtgaaatcgcgaaggggtctgctcatttttttcagaaaagggtgcggacccccgtagtccaccaaactgcaggggtgcaggcgccctttggtttgtgaatcttggtggtgaatggaccctctggtcttcgaactgctgaggctgaatgcccctgggacctggcataaagttaggcgcttggcctctgggtccttcaaactggttgggatgagggccccgggcagtttcaaactgactaggatggggccctcttgggcccacgaaatgaccagggggtggtcctctctgacctccaaactgagagggaggggggccgcctcgggggcctttcagctgagacagcagtggccttctctggcctccgaactggaaaggcgcgccgcctctgcttcccagaaatggggcttgctctgtcccttcaaactgggcgggggcgcccgtcacctcgttatacggggcgtcctggaactccctcttctccccatggggatccttgcgttcttcaaattgggatggtgccactcctcgtggtccaccaaggtaagagggtgaggggcctctgctgtccccataaggaggtggcccatgttgccccgagaataaggaagggatgggccccttctgggctccgaatctggctggcggaggccctcgtggcccatcgttagaagcgatattctcttctggaaacggaggggctggcccccttggtcccgggaaattggggccgtgaagccctgacatccccaaagcatgaggtccaggttcccgctgaccctgaaacgggggctgagagccccccactttctgtcctggtggggggagcggggcggtgccctcgccgggtctggcctgtggctctctgtccccctctgtttcacctgcagggctgctgctccttccagcagaatgaagatttcttgggtcctcatactgggctgagccgagagccttgtcctgcgacgcgaaccccgggcaggtgaaagggtccctctcaccgtcgtgctgcagcgggaagccgggctgcagggcgccgcaaggcggtgtgggcagcagcaccctccgggcaggcctggccgagctgtctccaaccgtggcggggcgggtgccctccccaggctctgccttccagccgtcctgctcggaccccgctgggggcttttcgcccgaagcccagggggaagaggctggctctttttcctccgggactggcatgggcgcctggcccacgaggccacccctggaagcatctctctcgggcagggcaccctgggcaccacgtgccgagagcctggagagaggctccccctccccctcaccggtctcagtggccaggcgcctcgcctgccgggggtccctgtggtttgacgcctggctggcggggggcagtgaggcgggcttgtctgcagactgctgctcttgctggaacagctctgccttgggcaaggacgactttggtggtggagacatcaaggcgtccgacaccgagaagtgggccatggagaccccgacggcggccctctgctgcctgagagcttcttcttgctcctccagctgtctcttctgctcctcgatctgtttgttcagctcttctagcatcttctgttgctccaccagggagggcgtcgcagccccggccaccggctcggcaggcctctccacggagttccttctcacgtcggcacacatcctgttgggcaggtcatcaacagtcactttcgcttcttctaagatggtctcatcctcggggtcataggccacctcttcccgctcggctgcagctgcttcaggagccctttccacctcgtggcgccgccctcgctccacaagctgagtgtcgaaggccctctccgggtcgtactcctcctcagggtcgtatggcctgtcgtcctcctcttcctctagagccttatcttttgagaactgaccgaactgctggacgatcggatctaacaacggaggtgccggcaccccgtcctctgctgtggttttgggctcctgggggagacctgcggtggacccgggaggctctctggcggacgggtcgaatgatttcttctttccaaagagagtctgcaggatgtgctccagcggtgatgctgttttggaagcagacgaagcggtggaggaagctgccgtggaggctgccgctgctgttgtggctgctgtggctgggctgggggctgcaggtttgagggatgacagcacttttagcaccggtggttctggaagagggggcggaggcggcggcgacccaggaggtgtggtgctgacagccgcgtctgcagagcagagtggatacttggagggcttcttttccgactgcgggactgtggctacttttggataggccggaacgtccgcttcttccggttgaagtcgggtccgcttttcgtccatcttgtctaactctccactgtttgcgggacgtttgattttttggcagattactaacccaagaattatattcggacgtggtgactcaagacctgaaaaacaaaatatttgtgcaaattttagaatctaaatccagcttttaccctttagaggtgaatttcattaagggctttcacggggaacgtttaatagacaaaaataagccattctgtggcaaaataagatcaagtgtcaagacagttgcaaaagcctggacgattccgccccaggaacgcaccgccccgggaacgagctgggaacacaccgtgccaggaatgcaccaacccagtcctcccggagccatgtgaagggggcgactaacccctcgtcaccaaccatggaaccgaaggcccaatccacaagggaattcatcccaatcgtctgaatttgttacatattttaaattataatgctagagcagtagtgtggaggggagggaggccgtggtgtgagcctgcagggtgaaaagggcattgtcgcacatgccctcaacacaacagctcagctatgctcttcttcccctcgtgccactgccaggaaggtaacaaacagcctttttttttttttttttttttttttgagatggagtgtcgctctgttgcccaggctggagcgcagtggcgcgagctcggctcactataacctctgctttccaggttcaggagaattctcctgtctcagcctcctgagtagctgggattacaggcatgcaccactatgcctggctaatttttgtgtttttagtagataagaggtttcaccatgttggccaggctggtctcgaactcctgacctcaggtgatccacctgcctcggcctcccaaagtgctgggattacaggcgtaagccaccgcacccggacccctttttgtctttaacttaggagttgcaacacataattactctaaatatactaatattaaattatcaataaagtcataataatcaataaagcacaagccatgaggtcatccattagtctctggtgtcagaattacaactagacaggaaaaacagcattaaatgaaatggctaaaataaatgctttggactgggcatggtggctcacgcctgtaattccagcactttgggaggccaaggcgggtggatcacaaagtcaagagtttgagaccagtctggccaacgtggtgaaaccccgtctctactaagaatacaaaaattgggccgggtacggtggctcacgcctgtaatcccagcactttgggaggctgaggtgggcggatcatgaggtcaagagatcaagaccatcctggccaacatggtgaaaccccgtctctactaaaaatacaaaaattaactgggtgtggtggcgcacacctgtagtcccagctactcaggaggctgaggcaggagaaatcgcttgaacccaggaggtggaggttgcagtgagccgagatcacaccactgcactccagcctgggtgacagagtgagactctgtctcaaaaaaacaaaacaaaacaaaaaacaaaaattagccaggcgtggtggcgtgtgcctgtagtcccagctactcaggaggcttgaggcaggagaactgcttgaacctgggaggcagaggttgcagtgagccgagatcgtgccactgaactccagcctgggcaacagagtgagactctcttggaaaaaagataaaataaatgttttgggtttagaaattcagtgagcattaacatatcaaagactccctaaggctcatgtctttgtaaacacaggacagacaccacgctcacgtaaagcaccgaggtgctcagcaaacaggtggcaaagagcagagcaggtggacgacgcgcactgggggttttaaggcacagtattagtttaaaaaaaaaattattcaaagatattcccaacgtcgtaagttgtggtaacttcaatcaggagtactaacattccagtaacgaccatccccacactcataatcaatcaagaatgccaaaggggaatataaaaacccacatcccaaaacaggagctgaaggaaagtgatacacgtgggtgggacgtttcagcggcagcgacgtaacactatgtgagattaaaccgtaacaactcaacggtacagataatttaacgtgactgtggtatacaaaaggtgctcacactacagattttcttccccttacagtgaaaaccagtatgatttcccgtgcttcaggtgatgttaaagatcatcacggactgcttcaggcaccaccatgtagttctaagtacatctgttgttcatctccctaaattccactaaggaactgatggacaggctgagcacggaagatgggtgaaggcaggaataccaggcctgccagactgagttgggaccagcctgctccacgggacacttcctccctcctggagagaggaccaaaggcctcttccttcacaggctgctggacagagctgagattcccagcacctcacctccacctcctcttcactctctgtcccccggatagtagcacggtgccagtgaaagggctgggtgggcagaggaggagggaagcaggaaaaccagccgggccacaccgaagggcacagctgagctctgctgctcagcaaacctgtcgagttcatgttctgcttaacatgagttgaacatattttaaaacggtatttctctcagcacaacagctatctgtttactgaataagctattacacagcttactcaaatccacttttcgggtatgttcggttatgaaattggctattatggccttcctggaccatacatctgcagagcccaccacgccctggggtgaagggcactgaggctcaggctgagttctgtaagccgggctctgtaagccaggccctctgcctgcagaacctgacacggggaacagacacaggcatgggctaggcctcgggaaggaccctgggcagtagggcttgtggggcctcgtgtggggaagttacctggggaagcctagtgctgactctgacacagaggggacatgccacccaagggagacactcagcttctaaagggctgttagggtggcagtgtgatgtacaaaatcactgttacgtggtcccgtctcgtggtgtgtcactagaactcaaacttttaatggctaacttgcttgttaatgaaaaaaataattagtatatcccaaccctggcaagactcgttagtcttgaaaacagcaaccgtctggagattggcatcaaacacgcagctggcacgtgtaaatgctcccagctcttggtgctctcaactgcaaacactggtgactgaataaagaaagctgcagagtcagatgggtgctcgttctgaatttccccgccatttaaaatttaaattgggctgtccaaaaaggcacacccgctgtgaaacagtcaaatcttgtcacccaactcatgtttgttattatgtatggttgcatgaatatgtaaaatgtggcaggcgccttggaaataactcttcgtggaaggagcagtgcacttcgcctggctggaccttgggagccatcttcccctggaggaaagggtgtgcctgccactgcctggcatgtccagcagaccagtaaggtcgaaaggtcacagagcccccacctcaggggggcagtcgaggttgcccaggggctgttcccaggctagcccctcccctcggcagctgccccgtggtgtgtgagccctgggagggagagtgccccgggaaggtgcagagactgaggcctgcacgaagctggcaccagccaggttgcgggtggcacagggcacggtaggcttacttacccaccttcctcctgagggctactgagggcctcagttcataaagcaaccaggggccggggctcaggagcaaccagggaccagggcctggagacgccagctgcggctaaacgtgcccctgcacttccactgaagggtactgatcaggcctggaacaagggtgtggatgttcccccaacgccctctgaaaggccagaaggcaaatggctttcttcagggcgtaccacgtgcaagccaacaggcctttttagcacatctgtgtcctttgcgtattcatgacggaggggtctggactcagtggtcagaatcagaccacacgcacaggaaaagaactcaagaaactgaagataaaagggtgtattcgaaaagctgtgtgggccaagaccaaaaccaggatctgtgtccaggtgtgtcgcaacagggactgggggacaaggcagctggcaaagggaaccacctgcttctcagggtgcaggaagcaccctcggtactgaacctgaggctgcaggaagacgctccttcttactaaatgaaccacccgaaacctgactcctcccaaccccaaactatcacagtgaggcctttacccctaaagccacctggcacatcccactatcagtgatttaaaatgaaaactctctcaatggtctgcacctgtcaaaacaaaatgttcacacctgctggaacagaaacggtgtggaagttaatcaacaaggggtgacgtatgacttggatagaaagacttggcaattaaggtgggaagaagtgacttcccccaacccaccaaacacacccactcacacacacacagaccctcccttgttccaactgggaatctctaagacctgcacaaagccactgggtccagcacgtctcaggtaagaggagagcgacgtccatcttcttctgggtgccggggtgccgagaagggccccagggcagcaccagcctgcactgcgtcctctccagcagctgctgggtgggctgcagagctgggcacactagggtgcactgcgctggcttatggaaagcaaacaggggcctaggataggtgaccaggagccaccaaatggttccaattcaaacaaacaaggaccagtttccatgaaagatgtttattgatttaggaggagaaggcagtacattccattcaatactgtatttgactctgattacaatttccatgcaaagctactgttacatacacacatgaaaactgaagaaatgcttacctgacaatatttcaagtcagaatttctcagctaatttagaaagcaattaaaagtgaatacagaaagacactatggattcaaacattcttcccagaagagctttctaatgtataaagacctcagagaaaagagccctttccattcgagcagctacagagggcggtgtttcctcctgccctgtacttggggagaacagactgtgcacccatgtttatggaccgaggttactccacaggcatttcagaccaaggctccgaggcctgcggcttcacgcggaaatgacgggggctgggcatggttaacaggcaggcatcttggctgcggtccagtcctgtaagggccctgcacagaaccctacacgatgagctttcaacctgactcatctcccttccatgaacaaggccctgagacaggccgggactctgcgaccccaagtccctgcggggggccctgttggtaaagctggaactgagtggggtgaacatctaggtggagaaggtcacctggaaccaggcctcccagctgccccccaccgtgatgctgagttacagagagtgcccccactgcggggcagaggggcagaggaagacaacccggtgtttctgtggacaaatcattaagatatgcaaggacaaatgtcctcagggagatccagctactgctgtgaactgcatggctcctgagggtgctgcgggggcagctccactctcactgcccgacaagggccaagtgctgacagggcgggtgacttaagtttcccctgagggcacagctgggcaccttcaggccttcacttgcttaagtgtgaacagcaagcactgagggggctaggactggacaccacgctgtcaaaacccactaggtccccatgtgtgggaggcatggacacctgcaattgtgtggtataaactgaggcacatggacgagtcagtcactcttttctgcgtgaatctctacccccaacaggaccttctccttaacatccccaggggaagatgctcccacatcagtgccctgatgcagacgggcagctcaaggctggggcgccaggtctccttcaggcctgtgctgcatgtgccgcagagaactgaggctgtggaatggagctgggtcctgcagaccctcacccagcacttctgggggcgtgactccaagctgcgcagcacacgctcacccctgaccacagctctgtggagtcaccaccatcagcaccctcaggtgtggcctgtgctgtccaagggcttctgggctatctccgtgaggacagggtccgctgagacaggggaaacatgccaggacctagccttacacacacacacgcgcgcacatgcacacgcactacacatttacaccacaaagccaggacacacatgtacatgtttatatctagaaaacgccaagtcaagtaatcagtacgtgaagcgggccgagtacccgatggcctggcccggggtgaaggctgtttagtgaccatggaagtgtgtgagatttcacgcacacgcattcatgtcaacaaggacatcaggagaagttaacattatactgaagtcttaagttaaaacatttctgaagtgtatggaaaggtttcactagctgttacttttctaaagtcccttgccctgtgttactttacccagacgcctctgctctttatcgtggatcaaagtccctggggcttttgtgtgtccccgtcaggcggcgtcgtggcctcagcaagtgccttggtgggcgagtgtgacgttcccccagctggtcgcggagctgacagtgtgggtggttggtgccatcgcactcagcagacaaggtgagtgaccccagcccagccctccttgtcccggtgccatccgggaggtgctgggagacctgtcctttccctctgccccggggctgcacctgcacagccagcccttgctgtggggagaatggaggcgccgctcctctggtggcctccctgggccccgtcactgcccagtgtggggaacccggtgcccggcatgcgccggggctcgctcaacaccctacaaccgtgctcacctgacagctccaagtttggagatgagcagggagagaagctcaagaaaggatgaaatatcgcctcaattgttttaaaaaggggaggctcgctatctaagaatcatgtttctgtaaagaaaaagtgctctttccaccccggtagggaggtgctgaggtgctgcagtgtctgcactgagtgcacacactgtcgcacttgcaactgaccagtgggtcttcacaggtgcggagaggccagcttctcggtcttcacctccaggagggccgggcttttcctctccctggtcacgtggagctggccagagctcttcacaagcaacaccaagaacctctaccagggtcctttctgccacccattaggtggcatctctttatcccaagtaggatttgaggggacacactaaagcactttgcttttaaaaatttatctggcactaaaataatttaatgcaccacgccagcaaatatttaaccctgaaattactgataccaaccaatccctttatggacatataattccacaacacaggcataggctgagcccactccagctgtgaagaatgggctccagtaggaacgtgggctgtgcctggggcgacagaagtcccgcccaagatgtggagtggcccctacaggaccccagctagctagggtgcggcatgaggggtgtgggtgggaacaccctgcacagctatggcaggaacacccgccgaggcctggtgacagggacagagggcactgaggcacagggtccagacagcacctgcctttatgacgaagcacttcagaggacactgtgtgatccacacacccgctttgagagaacaccaatcctctggggactgcatggccacggagacacttcagttgggcatcagatactaacccctaactgaagtcacatcagcttcttctaaggggctatgaaagagctggtcactaacagagcacgtggcccctggaatcaccctcaacccttgacaaagatgtattttaggctatttgtaaataatcgtttaaatacagtactttccaaggaacgtgcaaacacaaaatagcttgccaaagatgaatgaacctattacaatttgagctgcagattttaaaataattatttctagaaatagttttctatgtcattattgttaagtctcctggaaatccatccctgttagagaagtgatccctgatggagccacttcccggtgtgtgctggctcccgagtctgtctagaggaaagagcagggccgctgggagtgtcacctccctttctggctgagccttgggcttctgggcactgagtcttctctgacctgaggccaagatgagctggttgcaggctgtgggtttttccctctctaaaaaactctcctaagacaatttatgctgtgaatcaggggtacttctcgtgccacagtcctacgccctcaaagatgaatcctattgctaaccgctgcgtctgtgctcctaactcctgctcccagagagccctgggctggtcaggactcagcagggcatgtcagtgggaggaggggtgcaggtgcaggtgggcctcacctccacccagaaagccggcgcttacctggtccctcaaagggcaagagtttggatggaacagggtcctgggcgctcagcgggatcaggtagaggtccttgacgtgcctgttgttattagctacaacaccaaagcggccacggctgctgaaataggagtagagagagatataggcgacctcctcttcctctgtggcggggtggaagcggatcagacagagctcctgcaatggaagagtgggaagcactcataaagaaaatgtggctcaagcatcacacgcccaattcacatcctgctttcaacaggaaaccttgtcagatctctccgactcacagccacgatctcacagagctgctgtctcagtgaggcaattcacgtgacatgtgagcccagcagtgtctggagccgagccggctcttcctacatgcacgacggccccggtcacgaggaaccagctgcatgatctgcaatggctgtctgtgcccctccctagagggggttaaactagacgacagggtctagccctttcgtgaacctgacgaagactacagagattccccagagaaaaccacagacagacacgcacagctgtagctaaatctcagggggtcccagaaaaccagaaccgttcaagagcccaggttgagtgccctgagcctgatcacccctgcaaaagacaccttctgctccttcaatcataaaaaaacaagaaaataaaacgtatctatttcttcctaaaatttaaccgcacatacattataataaatcagaaacaaacttctaccgcggcacactcagacaccttcacacagtcatacaactatgtaaactttttttttttttgagacagtcttgctatgtctcccaggctggagtgcagtggtgcgatctcggctcactgcaaaacttaatttttaacattcacctggaaatatctagtaagctacaggctaacattttaagtgttaacccatccaaacgagaggttaaaaaaagatgtgtttaaatcaacacaattttccatggttgcagaatttatactataagcaggtaccttagacacagaagacttgagtttgccaacataatcccaaactgtcttcggtgcgatcctcccaccaatgtgaattgtgtcaggcaaatcctaaacagaaagtactttgcgtaaatcactttgaactgtagtagtcacagaaagacgaatgcagccatgtgaaggcacacactacccaagattcaagaagactacagctattccaaggaaaagagtcacacttgtattaaatgcattaagtccaggatgacaagtggccaaatccaaagggggagtgatgccaaccttctgccagacaagattatgtttagaaatgactgcccaacacttctatgctgtctttacgtacatacacagagagtaacgattcactatgagccagggtgactccttgcattaaagtcataaatgctagtgctgtcttctggttaattctgaaaactaaaaggcctgccacggggtcatatgcgccaccccgcaagtggccaggtgtgtgtaaagcaggctccgaacacctggctgtgccggtggctgtgcgcacagccatgtggtcagtgccccagcgaaaccgatcactgagaggccagactgcaggctcacatttccgaccctgtccaaactgctgaacctgcggactcatcacggccatcgccactttgcatttagagccgtttctgcatccagacagacggttgcaagagtgtcaggcatttctgtttctctcctacctcatgaattaagggagaaagtcatgtgtttgactctagtttagaaactcctatgaaagacacacacacgcacacacattttcttggttctaacctcactgaggtaatcaaaacacccagagacaggatacgccttagtgacaaattttgccacactctgcatgttaataaatcctttccaaatggtgctgagtcgagacaaaaagagggtcgtgtctccctctggaggggaacgtgattctgaagtgctgtaaaacaaaaccataaaaaaaaagtcaatgtctctctgtgcaatgagaatttcaaaagtagaaagccttttttttttttgagacaggatctcattctgtcatgcaggctggagtgcggtggtgcaacacagctggctgcagtctccgcctcccaggctcaggtgatcctcccacctcagcctttcaagtagctgggactacacgcgtgcattaccacacctagctaatttttgtcttttttgtagagatggagttttgccatgttgctcaggctggtttcaaactcctgggctcaagcacatgctgggatgacaggtgtgagccactgtgcccggcttcaagagtacaaagactttatatgtaaaagcaaaagtgaacgcttgcaagttttacgtttttggtagcttacttttgccaattacttactttaattaaaatgatacagacattttggttaaagaaaaataaagtgaataggcaacaaaactggatgagcacaaatttaaatgtcaatttctaagatctctacttccaaaaggacaataaggcaccctacaactggggctttttaaaagatgaaagagtgaagctgtatttcaggttacatttccaagttcaactatttaatcaccagttatctttcctttcgttaatctaaaaaaaaagtttggcttgttcagaccacacctgaagtacgcacctgatatttggtgacggaggaactgacaggtatcttgggtcaggagatgaggatggcttagctagtatggacttgggcaccatcacagaagtcaagacaggcttcggcacatcctgtctggcttccaccatgtgggtgctgtctgggcgggatgctgcggaggccacggctgtgcatgaactgcttggagcggtcctggggtcccggccggacactgtgacggtggtgaccaccccgctcccacaggaggctgggcagggggacaggtcttccagcggggagggctcgggatggccatctcctggaggcccagggaaatacgttctgtccacatttggatgagaagcactttctaggcctggctcagaggcaacttcaggcacagcctccggcatcacctcatcagctgaatccggagctgggtcaggtgcagagctgtcatgctttgattttaagtcttctttcttaacagaagctgacaatttttgttttttcggagctggctcatcttctgcggagggaacctggcctgaagaaggcgaggaaaggctctgtgagaaacccagccggcacactggtgtttctcacacaaagccgaaagcaatactctaaaggcagggcaggaaatcattctggcccttctgcgtgtttaagcttacgtgcggttgcttttaggaggttcagtgatttttaacaaaatcaagtttagtctcagctccaaggctccatcccctgcactgtgctcacctgtgcaaattttacagttgagatcgaagaggtgtgcgcggtgctgactggtggtgtctttcaacatgctgctgaagacgtcgagaagcggcgctgtgctcttctcagggacagcacgtgctgactcttgctgttcctaaaaaagaaaaagaaaaaaaagtgaggtcgtttcttctccaaactcagctccaaattaaccacacacaagaaaagcagtctcatgggattgagacccacgggggagaaaaaaggaccatctaatacaaggactgaggaatgccacaatgacatacacctgctgtaagctcaggtcctgcccaataatttaagataacctcaaaacatttgggatggattagtctattctcggtgaacacaaaatctcccaaatgcttacctctgaatccgacactggcggagagtcctccagatcggggatggcctcctgcctgggggccgtcttcttgctttcattgtgcagtttagttctggactccatcacctgaaatgaaaaagacgaaacagagcttaggccttgttttctaggaggaaagcatcgcttatgcagccgtctatgaatttatttctattaagctcgagtcctgggtgcctccgcaggtacccctcagcactcacagatctcgctggcctctctttccacgtggaaagctctttagatacaagttcttctggcttcagtctcacaagtttcgccaaagagatttcctcacgcagaacacgatggaagagtccctataaacaagtatttttcatttactcaaataatattcctatatctgtcaatacagagagcttctggaaaacacagctgcccagaagtttagcgggcacaggacaaaggccctcagggcccacttgcgtgtggcactgggcagagccctccctgcagggtgtgacctaactccccaaacggccttatgagagtgcgccccaggatatccctgctgtgagcaaatgggagcccagagagcacaggtaataaggttcaacagtgggtttcacggcctgtgctgcactggctctgctaaaaaaaaaacaacacacaacacctcaggaaaaacaattatgtacacaaggtggacacaagtcaaaaaggtagcgtcaggaacaaaggaaggaagaaatcatttctgtttagggctgttcaatggtgagatgcaaagtcagggtatttcattatcctaaaattctaaacagggaggagcctggaggccgatggagagagaacaccacaaggctgtcagcccggcggcctatccctcccagctggagtttctgtcctcgtcgcatggcccatgctgcagtgaggaaggactgatcccactacctgggcgtgagcagcccctgctccaagtggtgagaactcaagcagcccaaaccatcaggctcactcggctgatgaggaatatgagaaaataaggtggaaaaggctgtctgaggccggaatacggacaccctcatacactgggatgaagaactggactttattttggagcccagtgaagcgactggcttgtacctttacagcaatgtttacaggagactaatgtggtgataaaaggtggacttcagggaagccaggaagcggacgcgaccctagttaaggcagggaagggaaggggtttccaggacgctcaacgccagtgcaacaatacgtgggcggcagaaggatcacagaggagaaagaaacgtcttagctttcctggaaaggacacgaacatctcaaaatattggttgatccctttagcacccagcgaacagaacaggaatactccaatgcaccgacaccaggcacacacctgatttttagggtccttcaggttgaacatgatgctgcgatatttactcttgtagcgattatctgtaacttgaaacaagttaaacatctccttctcaatatggagggcaatttttcctacttcgttttctgtcatgattaagtcatcgctgtcattgactctgaacagaataaaaaaaaggaactacataagacacttgtgtatattaaactttttgaacagtgaggcaatcctgcagccacactctaatgaaagcccttccattttaatgggtaagaaatcaagcagaacagcccaccttttccacaaaatctcttttaaggagcgtctgatattttgccgaatttgtgaatttggctgcgatggtgcagcactcatagccccaaggcgtcctggggctggcgaggccattggaacagaaggtaccactggcttccttacggctcccaccaaagcagcggagccagggaacttcttggaggcagccgttgccgctgcaggtgccggtccggcctgcctggcagctgaagcaccactcgatggggtagcggagagccatggcctcttggggatggtgcccttgaaacctgagggtggctttttaatggctggtgtggctgctgccacattagcaaaagaagacttctttggcacgaggtttctaggtgcaggctgcttgcccaccgcggagcctggaggggctgttttctttgaggctgccatggctgccgctttctcctcggacctcctgtcttccttcgtggctacaaagaagaacacaggcgctgagtaagggaggacaccacagggtgctgtcacctgactctaaaaagcagacttacccttaaacctgtaagtgcccacctggcattactgaataggatacacatagagaaaaggatttgtaaaatgttagtgttcagaggagtgtaagggaggaccgccagcagcatttatgacggtgactacattttatttcagaaagaagaatgctttattattctatcttttaccttcaaccagcaaactctagttattaaaggcttgacttgcgcactagctaagcttcaaagctgaaggacaatttcctatcatcactttttaaaaggcagatttacagcagcactatcattatgaattcaagtgcaaactgtttgtaaacttcagtgaaaaagaccgtttagaagcgtaaaacaggctctcttagcccggtgggtggggtttacacatctcacttcgttgtccttccagactggagtccattggaggcgatgccattaataaaaatatggaaagctggcatacacctgaaccacaggaagagcagccacacctttacgtgaagagtgagaagctgagaacgcagcaatgctgttacaggaatgcgtccattcacagccctcaggctgtaattccattaagtgaagtatgaatccaaacaaggattataattaaaagctcaaagacatcaaaccccctcaacttgcacaaaaagctttctatgtcagtagagaatcaatcaccttataaccccatgtgagatcgtcagagcccaaaggccctcgagcaggggacagacggcgtgccaggggacagatggccaggggacagggctcgttgaggtgcaccgcatgccggggcagggatccagctagtggagcagagtgaaacgcctggggaatagggggcccccatgagggccccaggatggcagaggccatctcagctctacaggcaagtgcctgggagctacctcgggtgatcaagtcaacaaggcacctcctgaggaaaggcttttccaacgatcggtacagcagcaagcctccaaaactcccaaaggcctaaatgggagaatgtgacagatgctcccaagagcgcttcagttctacccagggactgaaaatcaaaccgcactcctcccccgtcgtcttactgaccgctttcaataaatgaggtaagtctgaaagctcaggaaagagccaagactctacaaataaggcctgattcaacagcctgccccagcttggtcctgcaggatatcccgcatgtgctgccaggcttggccacgttggcagcgggtgccagccctccccagcagccagtccatcaagcagcagcctcagggctgcaagtcttcccaacttcccagataagtacaactccttccatttttacaaaacttgcaacagtactacatggatccaaaaagcggtgtcactgttaacagataccccaactttcaaacaatggtgtcactgttaacagatattcgccccgactttcaagatttccatgtgttctttcctaaccatcattttaatggtaactaagtaaaggcaaatcctgtattttcatcttaggacccttctaacctcatggccggcccctgcctaccccttgctagatgtggtccagccacaggaccccctccttggcaacactgccaagccctgtctcctcacccacaaccgcaccccaaaacactcattcctgttggagctggatcttaaaagcgcactataaaaaatggcaacgtctaacacgacaggaacaaaggtgacagctagtttttatctgtccaggaaactttgcttttaattccacatgtactatgtcatcagatcaggtctatacaccccaggagtcactaccttagtgtttgaaaatctgtttttaacaactcagtttaactcattagacttagctcacaggtctgcagcatcttgcctgcagggttgcaataggtcagtcaggttaaataaaaatcagtggaggccctttttcttgggggaagcagcgagggggtggggtgaggatggaatgaaaaggcccagcaggcctagggcgctggaggcacaccggcaggaggctgacaccaggcaggcaccaggaaccaagccccggtctccagaggcggcagacagacacctgccgggaagccaaccgtgattcaaactgaaacctcaaaccaattcagtgactgcactagaaaccttggagtgttttaatatcacgtttaaagaactctaaaaaagctggctgaaagcatttccagaaacctcggcaaaatgccttggctgtgacacacagaacacctgtgtgctgtgacctgaacggtatctttaatgatgtttaacgctcaccttgttgcaagttagggttacatgctaccttcaaaaccatcaactccatttctccagatcgtaagtgttggaatgaggcgtccatggccacactcagatttctgctcgtgtaactacactattgtctccctcacttagggaaaacccgagttgagagatgagttttagggcactcccagtacatgggtttaaaaccacccattacccaagagtgggggcagcagattaacgtaatttattttaaaagcaggaaatagctttccttaaccattgctattttagaaaattaactgctccctttctaaaggcaacctttgtcatccctcatctgtgctttaaagagcatggaaatgggcagtcaggtgagtgaacggcagaatgttccaagccgggcctctgggagcagtgtcctacaacacgcagaaagccccattcctgctctgaacggacatgttctatccagcaactgttccagggacccgagcacacacccattccactccaggtgggacagcatggctggtgctcaacttgggtcagctgctgctgaaatggggacagaaactttttagtggagctaaaattcaatttgcaagttcatccaaatttgctttgaactattacgttgtgtataacttcagagaagggcaagcagcaactccaggcaacccaggaaaaaaccccactgcagaaacacagggctctgtcagggtacgagcctcccctacacgctgctgggccccctgggggcagcagtggtggtgacctggtcacaccgcacagcactgatgcctgagagccaggggtcccctgcccctccccacacctctctgccccttggtcgcagtgctgtctcctttagctcccacattctgggggcctgcccaggccactggcccagatgaaactgttgctgccgggtctgggtttcagccaactgcagaatgaagcaggtcgtcgtcgtgcacagggatcagcagcacactctaattggccaatttcccccaaagcagaaggctggctggcttgggtgctacagcgcctctggccactgggtggcaccagggcctgagcagagacggggaggagaaaatcaggcccccactggaggatggtgctactccgctcctctctgcagaacccatccaattgccccagtggaagttttagcaggacagggattaaaatatggggcaagagaccaagtctgctcagttctggactgtccagaggcccccatgtagcaaccttatgtgctggatggctccccacagggaaaggaactggttataaaaatcactaaaataaacaccacacgccctcacgtaggtgttgacaatgaagtggcctgccctgtcgcggtactgctggctggtttagggaagctggggcactcagacctccactggtctcccacggtgtcctgaatcctgcctatcaccatccgctacagctctaagggctgtttctatgctatgcacctgaaaacagactcaacagtcagtgaaggaactgtggaagtaaattctgttcactgtgacgtcaggcctatttgcagccctcagtgaggcgtgtgtacaacaatgcagtttcctgctttacctgtttcttcactccaagattgcccctagtgggaacaatcaaggtggcagcggcaagagaaaatgttctgcttttgctcctctcaacatgctagaatgtgttcacatgaattcgccttttataagtagttactagtttgctttcatgttgcggggaaacagttacttcccaaatacagcaggcagactacatcgcagacgctcctcagaggagaccatcactacagccaggacgcccttgcagggtccacagctagactgccgtgttttggaatactcaaagctttccttggtcagttttcttactaatacccgctacttgagtgccttccaacttaatggagaggtgtgtaattctccctaagaaactcgtgtgatgagggccacgtggacagatggacgttccactcaactgcaatttcagttgtgcccagctgcacatggtgtgtgcctggctgccaagcccatttgggagcagagctgctgctcttcccaagatctcccacacgagtaatttaacctttatctaagttgtttactacttaaaccaacatgttaggggcatgttaaaattagtccacaaccctcccctgtaatccctccagtcctaaagggccatactcagtataaagcccctagctgacagcaccaagcaggtcagttgaggataaagccagttaccttaagctcttcttgccgaactcttccaggtttgcggcaaatgaaagttgccgcaaccttcatttaaataagtagcaaaaattcttgtcaatattctaagttacttctctaacttttagaagctaagaatataactatgtgtatgttgatgtgttaacagaaaaaaaaaaaaaaaaacctagtattattttacaactttatacaaatctacctgaaacttgtgtaccacattggaggaattgtagcaggcgtcttcagagctgacctctgcactctgtgacaccgagaatgccgaggaggctttcccgagtattcatctttagactatgagtagatccacagctccgaaaggtcctatgaaggtcactgaagaggtggtgaattcagggggaccgatcctgctggaaacttccatccctgcaccccacctgcccaaggtggctgaagcataagcacaaaggggcacctgagggatggacaggggcaccacgggacggtgctgatgtgggacttcaccgtgcagggtcacggttacggaggtgtgaaacctttccctgatgtaattttctcaatggcaggctgctttttaagtttataaaaagtaaaacacttaaaaataacaaaagaatgtcattactgacagccaagaaacttccagttatatggataacgtaaaaaaacaactatcaagctatattctttctcagaacaaattctgatttttctaattgggaggaagagattggtggacacgtagagtctgatgactcccagtctcgttttattgccgctgacaactctggaggagacagataaaaaaagagctcacgcgaccagtgaaacaagccaccctcctctcccggctttaaattcctgcaaaacactcttaggttctagaatccccccatgtattttttattaatgaaaactgagactgggtcctcttaggatttcagtgaaatgtgcttctggagcccacaccatgagttatccttgtgaacggtgttctccgtccatttcaccccaccagggccatctctgtggcagcacgtgggaacaagaggcagtgcttccacctgggcaccatgcttaacacagcatctggatttgggtttacaaactggcaacgttttccattttaattccaacggttagatgaaacgaactgtagaatctgctttgcagtcaaaatctgttcagatcctcagtgtttaagtcacttaatgagccatttagggagacaaaatactagaaattgcacctatcaaataccatctcaaaattttgagaattccatctcaaaattctagtcagtcaggtacatctcagaaaaacatttccaactgacttcatgcctcgacaataatgggaggtgaacagtggaaataaagagaaaaaaatggaataagaatttataaaaccacaaaagaaacatcatgatctttgagagaagttatgtgcaccaaatgtttacgtaagctaaataaactgtatatataagaaacaatttttaaaaacaaatgggaggaacaaggtgaggctgtgaaggacctactgatatcttagcagggggcacagcctccttctagcaatggcagagtgtctgtgcacaccaggcctcacctgttggacaggaacccccaggtcaaccgagtgccatgggaaggacaggagggtgcctaggtgcactgtggggagcagcagcggtagctccaccacgtgggtcttctgatggtatgtgtggtgaggcaagtgtgagtcagctcatgggacagacccacaccagcctctcacttccaaactcaccccctaccagggagggcgagctccgtggccagccagggaggcagggcaggggcctcaaaggcatacagtggtggcaggctccccagtacttgttgagcctacaaaagtgcagaggtgtttaggggagaggcagagacatggtagctgctgtcaccaatgtctctaactctgctccaatcaatcaccttttgggaagacaacatttacgggataacaaaacgagcagaagctactagctcaaaagtgtgtcgtccccattcccatcctatacaaattctggaaatccaccaattttaacttgaggtgatgtgttgggaaggttaacaggcaatttcccccacctcctgtccctggagcaaatcagcttcccagaggagctgatgtgtggcaaagaagggaagagggagaagaggtcagagtaccccgctatgggcagaagagcagcctcctggtcgacctctccccgctcacagtgcaggaggcaggcaggaagcaataacccagggctgagagcccctcatttccccatcttcccaccaatgctccctccccacaatgtacacggactcttccaactccacatgtggagtctctggcagcttttcaattttggttgacacagatggaaattaaccaaactgaaattatcacccacttatctgaactgaggctataaccgcagtttttcttttcttcactgttatgtgtctaaaaccaatgtacagctaaattttagtacagcattaaaaatccctctctgcattcacaggtgggtgacactttaagcccattagctctgtagaactgctctatcgtagaggtgctagaatctgatgaacatttgagacatttgctagcataaaattctcagctcaaacaatgtaaggtatcgagattcattataatgcagcaattgcatgattcattttatgtgcggctcaatttcttaggtctaggctgtttacatgatcaaaacgagggacatatttttcttcttttatgaagctactcatactcaataactgcatatttttagccaagcgctgtggctcacatctgcaattccagcactctgggaaggccgagttgggcagatcacatgaggccaggagttcaagaccagcctgaccaacatggtgaaaccccgtctctactaaaaatacaaaaattagccaggcatggtggcacgggcctgtaatcccagctacttgggaggctgaggtaggagaatcatttgaacccggaggtggagcttgcagtgagccgagatcatgccactgcactccagcctgggtgacagagcaagactcttgtctcaaaaaaaaaaaaaaaaaaaaaaaaaaagtgtcttttttgtaaggcacaccagacctagcataggtctgcttgcctgcatgagtgccttcccttagggaatctgctcaaagtctgacgacgggaaagtggggcactctgtgatcatctttgaattgagactatttaacctttcggtgctttttaaaaaaagcacaaaatgcactatagacagaaggcattaaagactgaattgaaaatagttttatagcagaaaactgagaaacaagaaaacattaaaattgcaccacagaatctgaggtttcaaagatctgtttgaaatatcttcatttcattaatttgaaatttggggcaggatatgatcttaagagtctaaacattcaagagacgagggcaagaaagccagtcacatgtagaataccaagtccaaggcacgcgtcctgcggtcaggacagtgttctaggtgtgaactcacttaccgtggggcctatgaagcaggagtgtgtggccttcgaagttcgaatgtgttcatgtgggtgtgtagcgtgtgaatcggacatggaaaaaaaaaaatcccctatctgcccagtcaaaaataaatgtacacctgaaaatcagatgcaacactaacttgcaaagattcccacaacataaaaaagaagtgatgctttcatgtgctggccgtggacaatgtggaaaaactgaagcgtatacagcgctgttgtcagaacaactcatgtgcagacaggggtggatgtggcgtgccgggcagtgtggctatgcaatcagactgggatgaagagaatacgaatacttaccagagcctgagagtgaaaacagagattaaagaatcaatcattaaggtgaacgttcaccagtgaggtttacagctttggaaaacagtgacaggaagtcctgacagactagggatggacacagggcagcaggaggcatcctggacatgggctctgcttcccgctgatggtgcagccggtgtctgtgatcagcttaacacaaagctgcaactcccagtcctggacaggcccaggggatggctatccagaaagaacgggaggggtccaggaggccaacccctaggtgatacatacatttatacaacagtgacggcgagggagcagcagtcttttctggctttactgcattgtaattgtgatcgctcgcccacgacggcgtgctgctctcacaagctgcttccttcccgagtgcttcactccgcgcagggaccaccactgccttcttcactgtggtctcttttttttctggagctggtctcttgtgcacagaagagattttaatacctgcctggataatcagtaaaaccccaaatcattaaaaaggtaagaaatcataccttcacttcatttcactgagagatgaaggcggggacccaatgtcttcctgaggccatctgaagaccctgcacccatcctgcgcctgcttggcagcagttcaacacacttgcgtattcggtgggcccgcggtgggcccgcagtttccccgtgcaaaactgagaacttcaaccacttgtgctccgtgaagggcggctggcacagagtcacctgcaaccctgatgaggtgccaagttgccaagatgacaggagcagcagccactggacaggctgccaagatgacaggaggagtgcggcaatgaaccaaatgagccaaatgagaggaaaggcctgcgcgcgaggctgtgcccaacgccgagggttcaaaaggaccagccttaaaaattaagtcattcaaaggctaaataatcatttgaaaataatcaagaaaactccctgaacagtgctagttgcgctttgctggtcacaaacataaccggggcagtgacacagccaccgccgcctgagcctcacaagggccttcaagtctaagacaagagtttgcgatctctaaacattccaaataacacggagttctttccaaataacacggagtacaaacatgagacaactctgagagccgggtcttaaatgaagaccacagccttgccccgaacccgcctcccactcctacctgcctgcaagtctacgctctacaaactccaccgggtggttaccaactcttctcacaagacagcagggtgtgtcctgaagtcttatgccccccgtacactgccattgtcagcatttgctttactgcacttgtgttaattaacccctcagctaacgggcagagaagggaaaactggtgggaaggtggaagacaaaggtcaaggcgacaccacgtgtgcgcccccctacacctgccacccccacacggtctacaaaccaacagttctgcgacaaacgctctcacgcctgtgcgtccactgcctgggcggctggtcctggtccactcacctgagcaccgcatttcggaagactgggcttctctggcttcatcttcatcttttctttaggctttggcttctgttctttacctgagcttagaaacttcattgtcgctgcggcgtgtttgaggatacagtcattactgcagtacaccgagtcgggctgcgccacgtgacagcacccggggccaatacattttgaggcaccaggcgcctctatcacctgcagaacaaaacagatgacttcaaacaatgtacttgccaattttaagcagttaagtgtgtgttttgtaaaatcaccatttatagtaccaaggccacagtttcaaaatgagatactaacagtacttttaatatgaataaacattttgttgattcaagctatgaaaaagccaggtaaggcattcacactgtcactgcccgtcatgccctgcagggggcaggagtgtgaggagacccctggactgccgccctctgctctgtgcacccctctcgagggtgggcggggcccacgggacctcacatccacgatgaggctccgctagaggacccacatgcagggcttcttcagatgtaattaaggatctaactgggatgactgcaagtcaaatgggtccggctaaatcaggtaaaaacccttaaaaaaggaactgggtctttcatgaagagagaagacttcatagctggttttgaagtaagcttccctgctttgagaggattagctgtggctaggatctgagggcaaggctgccaagtaaaatacagtatgccaatgaaatcggaatgtcagataaacaatgagtaatttttcagtgtaagtatgccccccaaattgcatgaaacatacttttttttttgtttgagacagggtctcgctctgttgcccaggccggagagcagtggcacaatcatagctcactgcagccttgatgtcctgggctcaagtgatcctcccaccccagcctccccagtagctgggactacaggcacataccaccacgcccagctcattatttatttttttgtagagatgggggtctcactacgttgcccaggctggtctcgaactcttggcctcaagtgatcctcccatcttgacttctcaaagtgctgggatgacaggtgtgagccacagcacccggccagacacacttatacagtaaaaaacagcgtgagggcttctggaagggaatcccctgccaagcctctggagaccacagcccccgctgcaccgtgactgcagtcctgtgagacctgagcagcaggtccaggcttcccatggaaatggaggcataaatgtgagctccttcaagccaggactgcagtaactcatcgtgcagcaggaggaaactcacgcaccacaaacagcttgaccactgctgtttacaaagtctgtctcgatgatcaggcctcaacacacacgaacatgtccctcacacatacttaagcgaaaccttatttctcaaattaaatatttaacataatcagttttcctccacagaatctaagttttattgagaatacaatttaggtttgtgcagggtattgtcaagcacaatgacaattaaaaaaagatgttgggcgtggtggtgtgtgcttgtagtcccagctacttgggaggctaaggtgggaggatcactcaagcccaggagatcgaggctgcagtgagctgggactgtgccaccgaactccagcctgggcaacagagcgaagcctcaactgcacaaaaaacagaatcaatatatttaaaaaataaagacataaagccaatgacttttctcatgaattcccatctccattcatctctgaatgcccagatgtggcctctgatagcagcgcagcatgagccttcagcccctcctgcctccaagggcacgctcccaggtgcacggcccagccttcggacatcctcaccttgcagctaatgcagtgcaagagtgtgaaggcagagatgcttctagacacagcaatttccaatacctgccagaggacaggcagctgggtggggacaggcccgggaccctggagggaccagagtgaaaacacgccaagtcacacctgccctgtggggactggaatggagactgcaaacacaagacagcagcagaagctgacagcatgtgggaaatgtcataaacatcagggggagagaattaagtgtcaacacagctgcaagacagagaaaccactctcaacacaagcaccccgaggagccagcaccagaaccacgaggcagctggagacagcaggtgacacaggagcaccgccactcccatcgttcagaaacaattcctttctgctaatgcatacaaagcatgtaagcaacacccaaatcctcaaagatgggctgatttcaacaattaagtcattaatagtagaggaggtagacagggtaagaataaaaatagaaaggcctcacccaggtggagtgaggcaggaacccgggagaggcaccgccccacatgggtgcagcacccgtcctgggaggaatttctatctagagcgagactgaaaccagtgaggccgactgctgaatgctcgtctcagcggacaaacacttacaggctggaagatcttgagtttcttcttgccacttggatttgcagctttctcaattctaccctttatcccttggtcttcgctagacttctgctctattgttcctatacttgtacaatcggtgccatcagcatctccaggtctccatttagcttcctgctgatctgccgtttctgaatgagtctcatcctgcacttgcagaatggtgcagtttgggcagatatagtcttccccattcctttccaaaagcctccctcgagcctcagaaatgcccacacaatcgccatgaaaccattcttcacagcggtcacagcaaatcataaacctgaaattataaaataacggtattagcaatgggacgtgagtgacaagcacttttcaacacattaataagacaattggttttaacttcatgaaaaaatgcaaatatacagaaaagtagagattaagaacgtcctcatgcctttcctttgattttaacattcaaccaaatttacttcaccgttttttaagagtagcgcattttaggagcaaactctaaggcattccaccacagatacctcagcaagtctccccccaaaactgcgacaatgcctttatcccagcgccaagccaacaggctgcctatcaccgtctgacacccagtcctagcagagatcttttgagctgccccaatgtttgcactaggacacttgcggtctgcacatgcccctctgctatgtctcccaaggggcagtctagaggagcagtctcagacagaccccggagtgacggacacattctcctccatgccgtctacacagagccactggctgcacgtggctcacgtgactggggtggggcgctattcacctcctcacttgactggaaacagccatgtgtggccagtggctaccagagtggagaggtggctctaggaagtccttagccactcttatgtgtttcttttttgacaacttgttcatcttttccaacaaatcgctcatccagcccagctttgtaaccctttaaaatgaaaacaaatggaaaattctgtttgcaaccctgggatttctgtgggtgcccacacatgacccacctgttgttgtgaggctggcggcaaatgcaatacagggcgttggggtcgtaaccctcacattcaggcttcggtcggcccaagtctccaggctcctcatctttgatgtcctgagccgcctttccctccaacttactctctctgtcatctttcccagcctgggacacaaccccctgatcgttctcgggctcctgcttactgggcaggacgccctccacagtgtcactggcctcggagcccacagtctcggcgggaccctcctcccggcgcttcttccgcaggcgactctggatccctttcaggggcctctcagtgggctcctgttcccgcttcctgcgaaggcgattctgaagctctttcaaggtcaggccatcgctgtcactatcggaggtgtcatcgtggtcatcccctcctttcaccttttcagaagaggctggtcgttccttcacagctgtggaagcagactgggggccgcttctggtctcagaagcgctttccacgctgccctcggaggctgtctcggcgtctgtggcggggcaggacgtgggctcaccagaatcctccagggagacaggcatgctcctcctgccgcggcgccgcgcaatggtcaggaactgctccacgcgctcagtgcgcttgggctgcctcccactgcgccgcagggacaggcccagctgctgctgtgggggtggcggctccagtgggtcagcctccgcgtcccctgcgccctctcgcttggcgatagtggtccttcgaaaaccccatgttttcctgaactctttgctggtgggtttgatggccttaggtgcctcctcattgctcgggtcgcctttgtcgtccatacctagcggtaaagtgtaagcacatagtgaccaactgaccacagaacaaaaggtgacattgccgccaaacacgcgcagcaggggccacctccctacaaacagtggagctctacataaagcaagtccttctgaccagtgtttcctaatgtgtgctatgtgagatgattcaagatgatttgtaaagataattttaatatagttaaacaactaacgtttagacaaaaatacagctaacaaatcaaatgtacaatttcatcatttaactgctcaggacaaggcttcacaagccagacagtagggacaaataggaaatattggacagtatagcagggtaaggatgtgagtaaggacgtgagcaaggacgcgagcagctcggaggtggcacgagctccccagcacctccgcaggcagatgggctgctctgaccacaagcacagtgaacaagacgctgtgccagtttgggtgtggcctgcaaagggacccaagtctgttctggacttttgcaagtatgggctggccaccaccatgctgaaaagaggatatgaagaagctgagtcccgactttcagctccccaaccaggggctggggccaggaaggatgctatcactatctgggaccctccataccagccctgctgccaagtgaatgaccctcacgggcacaatgtgagagaactgcctaactcctgacccaacagattgtgtggtatgaaataaaccttgttttagtctactgagctttggagatattgttagcagcaagacaactgggacacttagaaaacatggtcaaggcgatcactttaaggtatatttctttttttttttttttgagacggagtcttgctctgtccccaggctggagttagccactgtgccaggccagtatatttttttttctgtattatttttcactttcattctaatacattactaaagaatcttatttatgaaacttttactcttgttgaaatgacaaaaatctgaaaaagacagtagatactttgagaattcttttccaagctgtccaagctttaattacatttcaatgctaatgatgactctgattttatgccatgttccatcctgggggaaggactggcataaaatgaaagccttaaaaaatatacaaaatggggccgggcctggtggctcaagcccataatcccagcacttcgggaggccgaggcaggcagaccacttgaggttaggagttcgagaccagcctggccaacatggtgaaaccccatctctattaaaaatacaaaaattagctgggcatggtggcaggcgcctgtaatcccagatacttgggaggctgaggcaggagaattgcttgaatccaggaggtggaggttgcagtaagccgagatcgcaccactgcactccagcctgggcgagcaagactcagtctcaaaaaaaagaaaaagaacgaaaatacaaaatggaaaattacttgcaacctgtaacctgtgttgttctttttgcttccctctaaatgctgtcacttctcattttcctgtccagctaaagatgctgcctggccgtggcctccacgctctgtaaacatgacccacaccccccagggcactccacggaagccttggagataagggacacatcacttctatgctcacctgaagtgaccccattgttaaaggacacagctcaactcaatcagggcaccagcagcgactccaagtcagggtgcaaactctggaggctgctgtgtgaggggggcactagagatggtggtaaacagaaaggggggcttccttcaccagccaggtgaccccaggcaagtcacaaggaaccgctctgatccaggaggcaatgctgacctcaaagattaagggcaaagcagagaatgctgcttacaaatatatatggtagagcaattattaaaccacatcagttaaaatggtttattcgttctcattggaaattttacatttagaagaagttttctgcttgtgcaagccaaaatatttgcaagaaatatgactgtcatctcaaaagagggtcaagctctcgttttcatgcaacacttggagtttctagtaaagatgtagtctgaggggctcgcactagcctttgcccagaagggcacaaagttgcagtcgcctctgcctctgggggcctatgaagctccaacccagctgaaaagggctgctgcatccatgctggtagctttctacaggaagagctctagtttataaaactgggttctcattaaagagagaacaggctatttgcacatgacctatgcaaaacctctcaaatatttagatcatctctagattacatcatagaaacagttgctgtactacactgttttataacatttttattattttttattgtcagattattatttattgtttgtcccccaaatatttccaatctgcagctggttgaatccacagatgcagaatctgctgctatagagactgctgatacaaatggctgaatgtatttcaaatgaatacgaatactacattctactatcagtttctttacaaatgccactttataaatagcaaatacagacttattaagttaaaattttgttgctactaacagtgttgataccttacctgctccaacactgaaagcttggacacttttccctgaaatcctaaatacaaccaaaaaccctggcagacgaaacctctgggtccaagcagacagccaggctcacaacaacactgttgtcagccactgttcacgagtaacaggcttcgtattttcaacaactcagattatctagaggctgttcccgtggagtaagctcctaaaagaaaataagaaaatattttacatatcttaagtaaactacgtatcgacaacaattaaaagggagtaccgaacttctcaagtaacctattatttgagtgatactgtgtgacccacaaagacagcttgggggttgaaaaccagcacgcaagcagtgtccttaaggacctctacccaggacagcagatgctaccaacccccaagagaaaggggccggggcagcgcaggaaggagtggagtcccaggcttgccccagggaggcaggcagaggcccagccagaccagggccagagaggagtcgccaagcatcagcttcttttccatttggagcctatgtccgagatggaccccactcaataaaatccaccacaaaacagaggaacaagaacaaaaagtgaaaaggctgaacatcgaaattatataagaatgtaataattgaaaattcttaataatgtatctgaattattttaattaaaaacaagaaaaattttagaatactaatgtttgtgacgtactaaaatcaacacgatacagttcaccacgtgtgtttaagaaacaattctcttgtatcctctctcaaccagtcacatcacaacactcaaaggttccaggtgccgagtttctagctaggtccttgccccaaagccgacacttccaaactgagccccagctctcacctcttcctcagcctcaagaccaactgccttccctctgtggtctccctggcaacctcagaacaaagggacaaacattccaactcccctccttttaaagggacagtgacaactgggcatagtgtttcgcatctgtgatcccagctgcttgggaggactgcttgagcccaggagttcaacaccagcccaggcaacgtgtcaccatgtagacaccccgtctctacaaaaaataaaaataagacaggcattccctctgataagccaaacggcatcgtcatagtcaccatctcttcaatgtggtaaaactatcatcctcaaaacaattacttcaagaattcagaaacgactgctcagaaaacactggaaataaacttttatattttgcaacactgagcatttaatttattttactttactttttaaagagttggcatcttgctttgttgcccaggctggagtgcagtggcccaatcatggctcactacagtctcaaactccggggctcaagtgatcctcctggcttagcctcatgagcaactgggactacagatgcgtgccactatgcccagctaatttttgaaaaaaattcttttagagacagggttttgctatgttatccaggctggtcttgaactgctggcctcaagcaatcctcctgcctcagcctccagagttttggggagtacatgaacgagccaccatgcccagccaacactgaacatttataaaagcaaagaaattaagaagttctcgggaacgaaaactgatttttaaaaattcaatttatgttaatctgcgaataaacacgctactagatttgagttctgagtaatcagaaaaatgtagttatttctgttaagtagaattcaatgaaggatataccttcggaaaagatcagatcactttatatttacaaaactgatttcataatgtcttcaacagagaaaatttactataacatttcagtcagcttgtaaaataaaaacatatgtatatcaaggcacaagcaaaaaaacctgttctaacacaactttttgtgtgtataattagtgtgtaattctacacactacacagcccatcacagggggaatgtgttcataaaactgcaaccatattgtatcagtaacaacttttccccagaaagaaaaatgtgggtatccttgaagctgggaagtgaacaaactacaggttaaaacagaatgtaccaaatttaatatttccacatttctaagcacatttttttccccagctgaaaactgcttcattttctattgactagaagcagctgatgagcggcgattcaagcagaggacacacactgacttccaaatgcttgaatggcggctctcaaaccttttgtctcaagacacttttacaagttgagaacaccaaagagcttttgtttatgtggaatgtattgctattttcaaaattctaagtatgtattaaaaataaacctattaatacattaatagtatctttaaatgaaagttatttctaaaacaaacaaaaatgaacaggaagagtggccctgttgtacatttttgcaaatttctggcataaccgaagacagctccatgttcatgtctacttctgccctcaatctgttcccatagagtgtttcagctaaaacatgtcatcaaaatcttgcctcacacagataggtctttagaatggagtattgtaaccatcttcacataactggatgttcactgatactacaccaactctcgccaaggagcagtttcataaaagttagctgaaacagaatttgcagcctttgtcaaggaacttctccctttctttcatgaaaactgactgctgtgttcactctgaacacgtccttgcactctggacccatgtgcatgctgttcacctggatgacacgggttcaagtaacagacagattctcaatgtccacacatctcatcggatagcataaaacaaacattttttttcctgttgcccaggatggagtgcagtggtgcaatcaaggatcactgcagcctcagcacctcccccacccacaccaccgccaggctcaaagcggtcttcccacctcaccctccccagtagctgggactacaggtgcatgccaccatgcccaggtaatttttgcatttttttttgtagagacagggtcttactatgttgcccaagctggtctcaaactcctgggatcaagtgatctacccacctccgccttccaaagtgctgggattacaagtgtgagtcacctcacctggccgataatgtcgggtccaatctccaagaagactttaattactagaaagccatcaggtttacaatggcagatacaagttttctaaaattccaattttcaccccaaagctcaaattttatccttagcaacaaatactgttcgttttttctttgagacatcactcgttttggacaaaacgcctgccacatgctgagtctgaaaactgtcctccgtctgttgttctgtcagggacagacagcgtttccgagaccactcggctcccagctcaatcccctagggctgtgcgtggacagtaccacgtggggatgcagcagaagctttatatataacttgacatttaatcacagcgaaagtaaaaaagatgtatgtttgcgggttccgaaaaaaattaatatttactgcatcatcagggacattatttgggaaaattggcatattctaaacattcggtgcccatgcacggtgctgaagagggctccaatctgccctgtgccaccgatgcaaatgtcaaactcaccagaaaaggcctgtactattagactattattatgcagaagtcatctttacctcttagccccagaaagggcttcaaggacttccccctcaggagtccatgaaacacaaagaactgtggcaacatgccatttctaccagtttaggagtacactggatatgtgcaaagcagtaatacatacctatgcttcagacatcagaagagactttaaacatttccttccacaagggttctgtaactacctgttaatcttccctcagattccccaactcaccaaaacagtaagcagccaaaagtgaaatttcttaaaaaccaaataaaaatatcttcccaaaaggtcagctctgttactttaaaaagcctaactgcaactattacaatgcatgggtttgcaaccactgcaaatctgtatgctcaacttttactactctaaaatctgcttgaagtcattaactcaagcgtgcccacttccaggttgtggtacagctgcatgatcagggctcactgcagcctctacctcataggttcaaacgatccttctgcctcaacctgagtagctgggacaccactggcgtgagccacagtgcccagctcccacctaaagattttcagttccaaaaacttgagactagtttctgagtaattaatctccaagacactttaaaatatgacatacaaccataattaagtttctattttcataacatcgcacctccaggaaaagagctctgacttctaagcaaaaagataaaacaaaaatgcatagtttacctcacctagtggcaaacattctgtttcttcaaacctcacattcccctgaaacaatattcaaaacaattttaacccgccagtcagaaattataatgctacaataaaacctcactattctaaacttcattattttcgctaattctgacagggtaggccaaagtttacatttatttatattttgcctattaagggtctcctggctcatcaatctgtttattatgcagatgaggagcaactgagaagacactaggtaaaagatctttaaactaccacaaatgaaggaaagattacccaatgaaagactcttgatagctcagttttcattaatgcgacagtcactaggagaatatgcctagaaacttcagatgacatccccaaatgcgacgtgttctccagccaccagcagcagccgttcatgtaccatgatggcccactcaaagctccaccagcttgcggcaggaaacactgtgctgcactcaccaaacaggaaagagatttgggcccacaaggaactgaagaagcccaactttcatttactttagtatctatgcagaatctgactcaattgcatagattacatttaaatccttcagacggcaaattcaaagttttgctgcttaccaaataataccgtcattacaaaaattattctgggccgggtgcggtggctcatgcctgcacttcgggaggctgaggcaggtggatcacctgaggtcaggagtttgagaccagcctggccaacatggtgaaatccccatctctactaaaaacacaaaaattagcagggcttggtggcaggtgcctgtagtcccagctacttgggaggctgaggcaggagaatcacttaaacccgggaagcggaggttgcagtgagctgagatcgtgccactgtactccagcctgggcaacaagagcaaaactccctctcaaagaagaaaaaaaaaaagcagcaagggtgccacaacacagtatgtttctcacaaagaaaatgtagagaaaaatccagaaacaacctattgttgttttacatttcttgggtatttgtgtttttatagatacgcggagacaaaaagcaaaacttgttactgaaaaacctgctgaggactaatgctttggccagcccccggctacagccgggccgccaagctccccatgtgagcttgcaacaatcctgccatttccctctatctacttcctagtgcaaaacacaggctggtgaccttggtgggcaactcaggtgggaaatttcaactctccaaatgaatgccaggaaccagaaacagtcacataaaatcatttatcgaggtgaaggagaagtgaggtttattgttctctatttaatggctggacataaagtctcctaaaccactacctttgatggactcctcttgtctcagtaaaaaagaaagtatggtttcaaacacttaagatacggtcccaattctacataccaggattcctgttgctcttaataaaagattaccacttgggccctggtgaggaccacaatgcacaggttcttatccccatgaagaaatccacctcatgccgcaagtgtggcagtgtgagctccccgggtaccatgtgagtggggtgcgctgcgggaggtcatcccagcagggtactgtgggggctgcttcccctcaagggcatctgtttattacaggtttaaatcactgttcctttatgttctcctcggtccacacccttagagacctgcataattccatggccccaagcacagcctactcttgcctccccccaacccccgattttcactgctgcaaaggattcagcaaggggctgtgtagggcactttgagggagaggtgtgtactggaacagctttaccggtgacagcgcatcagattgattccacacttgccccaaggggcaagcacatggttgagccactaaaaattgttcaaagacacagcttatcttcctaaaagtaatcaatttccccaagtgtttagagctattttacaactcttagagaagtggttctcaaagcgtggtccaggggtccttttgggaggcccccggatcaaagcagtctgcacaacaccaacattccatgctgtttccacagccactctgagtatatgctagagcatttcagaagctgaacggagacactaagtttgaattcggaaggagaatccagaagctgtcagttaagccaaacagatttgtgaaaacaaaaccatctttctcattgttttcgtcattgaaaacaggttccactaaatggtttacttatgttaatatataatggtttacaattttactttatttatttgagatggagtctcgctctcacttaggctggagtggagtggcacgatctcagctcactgcaacctccgcctcctgggttcaagggattctcctgcctcagcctcccgagtagctgggattacaggcgtgtgccaccatgccgagttattttttttgtgtctttagtagagaaagggtttcaccatgttggccaggctggtcttgaactcctgacctcaggtgatccgcccaccttggcctcccaaagtgctaggattacaggcatgagccaccgtgcccggctggtttccaattttaaatagaaggcacttcagcatttaaatgactcatttttaaatgtcaaacatggtgactatcaatagatataacaaaagctctttggggtcttccctgctttttaggagtgtaaagcagtcctgggtcctgccagtctggtaaccgctgacacagcagcgccttccactgctggagcctgaaaggctgctccccgaggccattccggttcagtcaggatcctagtggcagtgacaggtactgctttagcattcactttttccagacaccctgtctactctcattcagtttcatgtgattactgaccaggcagggattgccaagtgagatgatggccaccctaagttcaggtggagagaatggggtttcttctttaaaaacccttctctcacaagaatttgcttctcaaattggagctgcagccaattttttttttttttttttggagacagggtctctgtcgcccaggctggagggcaatggagcgactgatcacggctcactgcagcctcaatctccctgggctcaggttatccttctacctcagcctcctgagtaactgggactacaagcatgcactacaatgcccagctattgtgtgtgtgtgtatatccacaatatatatatactatatatatccactacatatacccgctatatatatatccacaatatatatacacactatatatatatccacaatatatatacactatatatgtccaaaatatatatacactatatatgtccacaatatatatacacactatacatatgtccacaatatatatacactatatatatatccacacaatatatatccacacgatatatatacacacaatatatatatacacacactatatacactatatacacactatatatacacactatatatatacacacacacacacacatatatacatatatacacacacacacacacaaacaatgcccggctcttttatatgtatgtgtgtgtgtgtgtatatatatatgtacatatatatacacacacacacatatatatatatacacacacacacatatatatacacacacacacaggtgtctacctggcctgtgtctccagggtcttgggagcatctctggggcctactcccctcagtgcaggttcagcattcccagtcctgacagctgcagccagcagtgcccacccccacccagacatttataaccaggacaagccctcagttaagcagatggggggctcactcaagggggaacctgtctatgaatgcagggttcaaccccagctgcaaacgatagcgggggtgggggggtacagtgtaccaggcagtgtatctgtctaggaacgcgggggccacagggtatcaggcagtgcatctaaggcctgcactttcctgtctgtgaaatggggacggtaacgacctcacagcttcctacaaggttttctgaagcgacatcctgtgccaaatcatctgcggcaagtgtgcaacagacggtaggtgccacctaagaaagtgacacagcctgtgctggcgagggcttggagagaaaggccctcttaggcgagtctatttgtccgacatatttgccaacagccctttatgggcttggcacagggaagagagcgggtgacatactgttctcatggagggcagggagtgcttcacgatgacccaggagaaattaagtaggaagtacacactaacttatgagtgttttttttctcacaaaggtgacaaactgaacacaaactaacagaccagtttgaaaaatcaagaaacatctatatagtgaaattctttttgttgggggtggggggtggacagagtcttgctctgtcacccaggctggagagcagtagcagaaccacggctcactacagcctggaactcctggcttcaaggggtcctctggcctctggcctcagcctcccaaagtgctgggactacaggagcacatcagcatgcttggcctaattattattattttttttttgagacagagtctcactgtcgcccaggctggagtgcagtggtgcggtctcggctcactgcaacctcgacctcccaggttcaagcgattctcccacctcggcctcccaagtagctgggattacaggcacgtaccaccacacccagctaatttttgtatttttagttagagatggggtttcaccatattggccaggctggtcttgaactcctgacaagtgatccacccatcttggcctcccaaagtgctgggattccaggcacgacccaccatgcccggccgggaattctttaagggtgatgaatcatcacatgcacagccgtgagaaaaactccctggcacctgagtgagagccgcagacaagccggccagggcagtggccacagcctccaacgcatcccgttcactagtgcaaaacagctgtaacgtggagcttttctggacagcaccctttctagtgtctttactttctatttttacataatgtttaagtttcctgtatgtgtattacttttgtaatcaaacacattaaggtatcttcattttggaaaaaaagttgatttaccttattataaaggtatattaagtaccacttaaatgtctatatcagcatacgcaaaacaaaaccacggcatcaaaatttgatacccaaggagagaaatgcctcctttacaacttacacacgattacaaccgcctattaagttttatggacatggttacagaattcttattaaaatatgtacaattacctattcaacttcatataacaacttaacctcaaaattactactcaaaaaataaaatgaggcctagacaacacagactgtctcacagatgactgtgtacacgtacatgaaatgagcaaactggactttgttctttgacctcctctttcccaattagtacatttccattaactgttaattatagaacttttgtaatgcaattaacacacatcatttgatagtagtcataaaaaggctgatcttagtatccactgtaagggaccccgtcatttaaataagaaatgtaagtgagagactctgtttagagagaattttctagtggtcttctgagcctgccagagagatgagacctctcaggcaagggcacagtgcagggacccacagatagtagggagtcacctgttaaacactttcaatcttagctcttcaagagccaaataagccacttggtattatgggacaggcatataaaaaggaaaaacgtgtcttgtttacagagattccaaacaatgaagacgtggcacagcttaaaaataaacactgaagagaagcaccctactgggctccacagaactgaccttaagggaattatgaccctaaggctgtagaaaaactcacagtatcaacagcagaacctgccaacttcaccgcgaacaaaacgggagccaatgcccattccaatcatttcctccttacatgaagaaaccccagcaccctccaaggcccaaccgatgatccgcacgtcctagacaagcctttgcgaggctcacatatgcacatgcaacatgggctgggctgtctggtaaccatgggtacggctgggcagtcaatcacaaattatcttatttgtgccctgtcttctcaccacagcacaatgagctctgcttgacatagtctgaattcaatcaactactaataagggacagcctctggtggaaagcctgaaaaaattcaagatacgcgcttttccaaaacaagaggtatcttatgaaacttgctgaaacaagtctacaagaacagacatctcctccccatgtacacagcaagtaggaaaacaagtgtgcattaagcagggagtttcacaacagggctgtgtctgtcttcctgggtgacacttctgagatgtctatgccgtatttaaaatagtgaaatagtcacagacacacatacactaacagcaacccaaagggccactaaagagccctaggctccaggtaaacgagttggcaacacctgatttaaaggaaggagctggaataatctctcaagttccccagtgaacttgtctccaggactgggacaggggccaccttggtcactgctgtatccctcgtgctaacagtaagcaatgaatgctcatttaaaaaaagactgtatttactccttaaaaggcactgctaaggacctttctcagaactgtatttcaaccaagtcatatgtggccctacggaaaccatggaacacggggtatatagcaaagttatgtgaatataccgaaaagacgttcccatctgcctttccctcctctaagtccctgagtacactaggctcaaatctcattccatcagcagacagatgacacggatatcgaaggcccaggcacaagttaaagagtattttcaataactggtaacgcagtaagctactgctacctgtggcccaaactctaaacttatatattaaagtcctttatttagagcagaaaagccggccttgacctccactgtctcagaaccgcgagaaggagccccggacgccgcagcggaggcagcacgagcacccctcccgccgagcgcaagagcgggccctttcggcttccggggtcactggaaggcaaaatgtgtcacaaatacggccagtacaaaccaacgcaacaaactattccacaaaaaaactgaaaaccagcgcggggaggtaaggacacactcttcagaaaagcgaatccgggctcttcgcgcttcctgcagcgccagccgcccctgcagtgccggaatcccccgaaggcacgccagaagctaagccggccaccccgaccgcacccaaggcccgggaggaagcgccgaggtccccgagaatgcctagggaaaccagctgcgcttacaagccagctacgcagcccccgagccccgggccgcactcgcccaggccagccctgcgctcttccccgcgagcggccgccccgactcccaccctcggaaccgttccagccgcgaccaccgagtgctcgccagtcccctcgacctcacgcagcccaccagggccggcgtctgaggcccgcgccccaggccgcggcggctctgaccggccccgcccgctcgcccgcccgcccgcccgctccttcccttccgcggccgccatcttctcggcgggagcggcctgtgcgggatccgcggctctcgccagccgggctccgatgccggccccgccccgctcccgagggcggcccaagcggcggccggctcttctacccggcgcccgggacgccacttaccgcaggccgcaggcctctagggtctcgcagccatttccccgaacgccgcggagtgggcggacggccaccgagatggcgcggggctagagcggcgcccccgcgcggcgggcggaggacgagaccggccaccgagacgctgcggggctagagcggagcccgggctgcgaagcccggccccggactgcgcgcatgcgcccgtctttcatacctgcactccggacgcgcccttcgggtctgcactgacaatgacttgcttgcatcctttgtggacaccttatttccccgactccaagagtgaaagctggggcagtgcccttgcggggatccctcggaacagcccgggcagggcgcaggcggaacgtggatgctagccccgagggactgcactccgccaggatttcgctcttaagaccgataaacccttcaagtcggtggggatagaaagctcctgggctaaatttgtaagaggtgtaggggggcggggacaggggataaaagaagaaaaggcccaggttttctcttccagattgtgtttctcaaaacgcaggcccctgacggcctcggctgggaatggcagcgaggggcgaggtccaggtgtgggcggggtttctctccaacttgaagaccctacctgctgcctccccaccccaagctcggctccagaaaccaggagcgtgggggtgggggggagagaaaggagcacagcgaggaagggaggcgggcacgctggacctctaggccccagggaccttggcggtgtggtcccaaagctctgcctcctcccaccatgtcaatcctacactcagaactactgaccagtagctagaactcaaagaacgcatggacatgtttgcccacaggggttggagggaaagattagacacttactatcaagagaggggaaagtgaggtatggtagatgtcaaccttccatgtggattttcttcagttcgctcaatagtaactagagtgacactctatcacctgtctgtccccagatactgcaggaaagagactgggagggggcaggaggggcagctgttgcctcgaggcaccatgggcactggccacttgctccgagggcagggacctggggggggtggaggtggccccattacttgtttctgcttctgtgaacagtgatacgctacctggaagcatggaccatctagcctttggcgttggccctggccaagagtaaaaggggcccagagtgccgtaaagctgcccctaatacagaggcttctgcgatgcttccatggatgaaccaggggctttgaggcaggtgtgctttttaataataccgctgaagattacagggtctgctagtttctgaggcagacttagttttcttcaaaggaatacaacgcagcttgtttttgctggtgtggcccattaggaccacattaatagaatctggcagggatgggcttgacagtcttccatcttgagtgtgatctcaggttgcaaagagggctttttgctctcagacatggggtagtgggaagcttagaagacagacggggttgagaccacctttaacaagcagtgagatcttgggcaagctctctgttaaaggagggctcacatgctgaggcccaggtgaagaccacatgaggcctccctacaagaggctctctctaaatccaactggtatgggggaacctcagcccagtctctttagctgaggatctttaaaccagccacaatttgtttctgcaagacggtgagatttttaagagattttaactcttgggtacagtttcacgctgggcactcaggagagatagatggaaaggcactaagggaatagaaagagtggacaaggcggctcagggacaagagaaccaagaggaagaaaaaggcaggaaaacatgaggaaagggaaccctcactcagctcaccgcagtgctcagcgatacgcagaatgccttccttcctgcaagtccagaggatactggaacctgcctctcgttctcatctcccccgccccccagcagaagctggctcggctgtggaggcctggccagactatccactctggccttccccacctacaaggtgacgaagtcagctttatcccagcttacctgccgtcactattcctgggagctgccctccctggtgagaaaggcatttggagaatctacagtctgggtatttgaatttgaactccactagcaaaagaatactttttcctaaccgaatttattttaaaagtaaaacccaaaggaggaaacaaactcttcagttgtttcaataaattgttccttaaatatccccaattcacaaacaaaaccccacaagtagcaccgatttacaacaggatgtggcccagaaagcaggaagggggccaagagcgctccagcaggaagcttaataggtggtccatggagaaaaacacgatgggtgcatcacaaataggtgtaaacagtacacttttgtaatgtgtagacaccagtttctgcaacccccatgccacgcaaagtttcagggaaagtctttgaaagtacaatccggaaaactcagcaattcttaaaaaaaaatggctttccgctgttataagcctccttcctaagactcagggtccgcagcagaataccctgacccaaaataaaaatactatgacaaaaatactccaggaggcagccggctttacttcgtttaaagccggatttcgcttagtcccgtgaaagcgaaggagcaccagcgcttcctgattccgcacagttctctcggcagagacggcccgtcctctccaagaaccggaagccggacagcgtcaggacgttttattcttctcacctgggattcagagaggcagcggccaaggacagggcccccgccgaggccaccgggcagcgtccaggtctcggcctttgggaggggagcagcgggggaggggcacggggaggggcgagggcggggcgcgcctgggcctcggcgctgggctcctcctctgcccgctccgggggacacccacaggattcttgcagacctctgccgaggcaggatggaggcctgcagggatgcaccgcgggcccgcgacccgggcggccggaacatagttctttctggccggagatcggcccggtcgtgagtcgtgtctgtgccaggccccccacgctgtgctccagggcctcagtgcccggcgcgccgggggctgtatcgccagccacttggggcaggaaaaaggaatcacaaaatacaaccctctcctttacccaggaggagaacgtggattcccagaaaaaagaaaaagtgtatatatatatatatatgcctactgttttcttattgctaacaaaaacttcagccactgttttgttttttttttttgagaaactgatgaattttctttacttttacgttgtataaggccagctaactttaacagttaattttagataaatcaactcaccaatgctaaaaggtgtcacaatcaaatcgtccactacttcccctcaaagcaaacacgaaagcactgcctttggctcctttgaagaatactaaccagatctgccaggcgcggtggttcaagcctgttcccagcacttaggtaggccgaggtgggtggatcgcctgaggtcctgaggttaggagttcaagaccagcctgaccaacatggtgaaaccccatctctactaaaaatacaaaaattagccgggcgtggtggcaggcgcctgtaatcccagctactcgggaggctaaggtaggagaatcgcttgaacccgctgcactccagcctgggtgacagcgagactccgtctcaaagaaacaaacaaacaaaaaaaaaaaaaacacagatctttgtctaccaaagggcaaatgctacgtttgtgcatcactgagtaacagcactgccagaaaaggcaacttcacagaattcacccactcaatgaattccgctgaatgctgttttgagacaaccaacacagagggagagcatggacgatagtgggtaacataaggggaaccggcaagatggaaaagggccaggaaacaaaagaattcaaggaaaaacagaaacagaagttaaactttgtgttccaaccccaaagacctctagaaagctgtgggatgtgatggagctacacgttctatgcggcatatgagaatcataccaattttctgtcttttagacaaaagaataaatgtgaaataggaaaaagggagggaaatgagatgggaggagggcatcaccccctttaatgctgtaccaaattactatacaaactgaattgttgtaattagaattatggacagtgtcttatcatttgtatgttaccagaaacctgtgctatgacttttaactagaaaaacaacaagggatgatggatctttctttggtcacattagcctctgtaagttactcaagacagctgcaatgaactgacaacaatatccacaaacaaggcaaaaggaacttctcatggcagggaactgaatctggatgttattctcagttctgtcattttccagatacctttagaaagaatgagctgcagtttgtgttgttgttttccttgagacaaggtctcaccctgttgccaggctggagtgcagtagtgtgatcttggctgtctgcaacctctgcctcccaggctcaagcaaccctcctgcctcaccctcccgagtagctgggactacaggtgcatgccaccacaactggctagtttttgtattttttgtagagatggggtttcactatgttgcccaggctggtctcgaactccagggatccactcgcctctgcctcccaaagtgctgggattccgaaggcatgagccacagtgcctggcctaagctgcagtatttctatatcttctgctaaggagtgaacacattaatacagaaccatgctcatcactccttcctctgagaatgtttcatgtttctctaaggtgtctaagttttctctttgaggtcagtgaaaagtaaataaaaacaactttggaataaatcaatattttagttaagtatagggcaaaaaactatttcttttctgactggttttatctcaaccatctttaaaggaacacagcaaacaagccaaaaaaacgcttggacagattctgacagaataagagtaaagtggttgtacccaaataggacatttacccttacaggctcttcacaccacggaatagagacccgcgaaaaaggggaaacgaacccatagacgactgaattcctgcacctgctggcgagcaccaggaggaaggtgcagggatgtccatgaggtcagagacagccatcagttcacactgcattccagacgcaatgggccccggccccattcttgggccttctacctaacctcaatgccttgggagtatgggaccttaggggtaaggatagggctacaattgtgcaggctacaattaaagatttttttcttaaatgaaaacactttaagaagtgaaagagactccagcaaccttccagaatttgtccagatatgaataactatataaattaattcctgctcttgcttagttcacaaaaacaaaatggtaaaactgagaaagagtgtgtttggaggaaataccaacaacaacaacaaagactgaggtattagcagtttccaaaagacacccaaatgggaactggaggttttttcccttcagggaggtcttgctttgttgacctggctggtctcaaactcctggcctcaagggattcccctgtctcagcctccccaaagtgctgggattgtaggtgtgagccaccctgcctctttcattccaataggaaagtatttaaagagtaaatgtagggccaggcacggtggctcacgcctgtaatcctgacactttgggaggcccaggagagaggatcacttgagcccaggagttgaaggccagcctgggaaacataggaactcttatttctacttctacctgcccatcagacacgtgatcacaacagctgcatgcatacaaataacttaagacacagagagaactatccacatgtatgtgtgtatatttacatatattttttgttaatttttataaaaaagaaaagtcagatcccaaaccagtaactgtctatcaaatcctgaccagccaggttcaaactacataatcaaactcaaatgaaatagtacataaacaatgctttgaccatgtacattgctactcaaaatactctttggcctttcccactggtctgcaatggcaggactgtatcaccttccctcctaccacatttgtttcaggtaacagtatgctagatacggtttgtctcaacctcagcaggagttaaaggttttaaaaaaataaaaataaaaatcaagaaaagattattcttgctctcacccaaacaaacttacaaaatattcagtgctttctgatttagtggtataatctagaaagggaaataaaatcaggcaaaaagagggagggggaaggtcacctatatcaaacaatcaccagtgaagattctttacagggtctgggttcaccagacacatggtgtcagaatatgtgcagcaggccaggcgccatggctcatgcctgtattcccagcattttgggaggcccaggcaggtggatcacctgaggtctggagttcgagaccagcctgaccaacatgaagaaaccccatctctactaacaatacaaaattagccgggcgtggtggcgcatgtctgtaatcccagttactcaggaggctgaggcaggagaatcgcttaaaccggtaggcggaggttgcagtgagccaagatcgtgccattgcactccagcctgggcaacaagagtgaaattctgtctcaaacaaaaaaacaacaacaaaagaatatgtgcagcagactaaatagtaaaattcttccttacctctttccaacatctctaattgtttaaaatactgtgaaaagtgaagttcatgaaaattgaggtctgagtgtttcctacctacttctgctaaccattctaagcatcaacaactgatgggtttatcaattatcctgaaaagtaaggtggtttgatttgcccaatctctttgaaagcctgaagtctccagtatgtaggggtttgattttatgcttttgggttttgagagtaaaacaaaacatccatgggaataatgtggttttgaaacatggctgatatcctggtttttaaacattctatgatttgagtaaaggaagcactctatgcagtggttcacacctgtaatcccagcactctgggaggctgaggcaggaagactgcttgcacgcagaagtttgagaacagcctgggcaacatagtgagacctctcctctacaaaaaataaacaaaattagctgggtgtggtggcttccgcctgtagtcccagctactcaagaggctaacatgggaggattagctgggaggtgtaggttgcagtgagccattatcacaccattgcactccagcctgggcaaactgctctcccctttttaaaaactcattaatgttcttttaagattaatatacctttagcactcctctttctgttcatctctttcaatatgaaacaactcaagttcaaagccaccacctcagcttgcaagacactggaagctctgaacacctggttgcccctcagctgactgtaagggccaagcctttggtttctctcatccacatgcccacctctgtcataggaaagctcaggcagttgatgaatccagcaggctgaagtccttgtcactgtcccagatgccaacccgtgtggccctgcaccctctcctgtcccgggacccacctacctctttcctgctctcctgcactcttggtgagcctccatgctggtggcttcagggctctggcccaggctctcctcctctccctccacccatcccttctccacagagacttcatgcacacctggctgtagttgcctttatctctgcctggatctgggcaccatcattcacctgctcccctggcatctccacgtgaatgcctcaaatgcacttcaaaacctacctaacacatgcaaaatgagcttaggacttctgacctccctactacatacttccaggctcttctctggcgttccctatccagaggatggtcccaccaccctataaattcataggccagaagctgagaaattatccttgacccccctccctgctcctcagtctcacctgctgctgcagcgttttgtggcatctagctcactgctcacttctcagtacataagtgcatggccctaatggcttctgaacaccttcaacatactacgctgtcttcacctcacccctgctcaccacactccaatgtttcccattcccatcacatctctcaacttcttgctctctcaccaaaaaccatcaaatggggagttttggcaccttcaccctggacttccctgccgcctggaaactgctaacatagcttctcgaaactggacaccctgtggcttcagggagcgcctttgaagcccctggttcttgtcagaccccccggccactttcttgctacccttcataggcagcttcttccttagtgaatacagcttgcagctctgcattctggacttgatccactccttgtctccatgggcttcctctgaatactgtacccatcaactctcaactctagccctgctcttccccttgagctttagatgtgtcccacaggcacctccaattgaatgaggcccacggtgaactcaccacctttccctcgttgttgcacctccttcttcttcatgatcattctcagttggtgccaccacctcatcagctgggctactcacccgcatcactctggtcttccttcttagctcccacaaattgtcagtcaccaaggactgctcatttccatcctgactgaaggtctctttccatttttgctagtattgcttccagttaagatcctcataatcattcactcatttattccttcgtcactcaacaaataaatatttatggagctcctattacgatttagccataatcaactcacatgaagcttaccattttatgctgaatcatgacatcccatcagacagcaaccacacggaccgtgtgctaagagctacgaagagctaagttaggattctgtgcaagcataaaggaaaggcactcaatccagctttgttagggaagacttccccgagaaagccacgtctctactgaggaggtgagcaggagttagcctagggaaggctgttagctagggcccagactgagagcacagcgataacaaagcttgttgacatgagaaaacctccaatcagctgggatggctggagcagagagtaagatcaggagtgcagacttatagctgcgctaactttacacaggcaactggggagtccccaagggatgttagaaggatagagtcaatgagtgatggcttttggagagatcaccctgtctgctatgtgagaggtagtgacaggacttctggagctcaacaggagttacggagacatcctggcaatccaaaaagcaaagatgatggcttccacgttatggtggaagaggctgggaaacaacacaaaggagccagtttctagagaggattaaggagggggctcgagcaggacttggtaaccggttggctgttgggaggaggagcattaacctgtgacccacaggcaggcactgagacagcctctttggactggaatgttaaggaatgtcgccttaaggcgctagcactcaagctttctgctcgtgcatccccttgcacactttctccttgacgttcaggctgggcatggtggctgacgcctgtaaacccagcactcccagaggccgaggcgggaggatggcttgagcccaggagatcgagaccagcctgggcaagaaggcaagaccccgtctctaaaaaactttaaaaaataaaaataggccggatgcggtggctcatgactgtaatccgagcaccttgggaggccgaggtgggtgatcatttgaggtcaggagttcgagaccagcctagccaacatggtgaaaccccacccgtactaaaaatacaaaataagtagccgggcgtggtggcgggtgcctgtagttccagctactcgggaggctgaggcaggagaatcacttgaacccaggaggcggaggttgcagtgagtcgagatcatgacagtgcactccagcctgggcaacaaagtgagactccttctcaaaaaatagaataaaataaaatcaaaataggccgggagcggtggctcacgcctgtaatcccagcactttgggagtccgaggcgggcggatcacgaggtcaagacactgagaccagcctgaccaacaaggggaaaccccgtctctactaaaaatacaaaaattagctgggcgtggtggtgcgcccctgtggtcccagctactcgggaggctgaggcaggagaatcgcttgaacccgggaggcggaggttgcagtgagccgagatggcgccactgcgctccagcctgggcgagagtgagacttcgtctcaaaataaataactaaataaagaccaataactgtttcccatagggttatgtagttgcaaatgaaaaaattactggcatgtactgcctctgcatatgaagcataattttgtcaagaccttatacctgcagatttagctctttcgattaacggaaaatgtccaaaatcagtctcctccaacctatttgccgaactggacttactgtcgctgagtagaccgaccgacatagcttacacgttgttcagctcgcttgtaagcaaacacacgaaaccacctcacccctgacttcagaaagaagccgtcccgtgaattcctcacagatgaaatcaggagctgcccctcaaggactctatttcttccttcggctctatcaaatattttaaggtacttcccagcaacggaaacatgggaccctgcaatgacagacttcgcattcctcctgagcggacaggcaataagcaagtaaacgcgcaaatacccaagtgcggcctcaacccgcgctcctgccgggagggtctccagtcaccgagtaaccccggccctgccccgcgccgccgccgggactccgccccgcaagcaagtggggtctcctttgtcccgcgcgccctggccgcgtcccgcccttcggcgtagcccatgggaggcgccctgagggcagggcccttctgattccccacctggcctcgagtgaggacgcgctcaacaacatctcgagtaaagcgggggaactcgcttcaacgcgcagacagcacagctctcgcccagcccggtctcgggtcagccgtctctccctggacctcagggacactagccctggaaggccgccggtcgggaggggactccctccccgtctgaggggcggccgcggacacccggcgcctttcccccgccccaccccgtgcggcctcacgcaaacgacaggaaaaaagctgggaccttcgcctccgactcagtgtagacgtcgccatcccggttccagatttccgcgctccaacgcctccgcagcagccatcttgccagagggccgacgccttttgactctggcgccaacccgtagtgcgtggtcgccgcgaggggagttctgcgcaagtacggaagctgaggttccgcgcttccgggaggccgtccgccccgccccctcgcgggggcgcttcattggtcatcggctcgcgctctcgcgctctcttgctgtcgcgagaggtgctgaggggcggcctccggtgcgcctgccctcccgctccccgcccccgcccccgcccccgcctccgccgcggcccccacctctgcctccttctactcgggcgccccggcggccgccacctctccccagcccaggagaggctgcggagccgcagccgcccagaccgcgcagcgcgggaggcaggttccgcacggtaagatggcggcggcgggcccgggcggccgggccgagcgtctcccggggccgggccgggcgggcaggcgggatgtggccggggtgcgcgccgcccccgctctgggggccttggaagcgccggcgctggcaggtgcggaattggggcgcgcagtgagtccaggcccggacggccgccccgcgccggtgcccagggggcagtcagggctcagcctccaggcgcgcggcctcaggcgctggtgttctggggcggtcccggccagcctgaggggcggcggtagctgtctctgtggaggagcgacgtccgtaacgaagtctttttaataaaatctgctgctttaaagcagaaaccgagcgggtgaggatgtaaagtgtggcatggaaagtaggagtcttcagcacacgggtgttttcttctgctgaatctttttatgctggagtttgagactaccgagttcttcctgctaacaggactggccagttctacaaagttgttgcttttcatgggcgcacgtaactgcccggagtggaagcgctgtgagtgccgatcaccgaatgggccgagagaaaaggtgccttttcctagggagctcttaacgttggtcctagggccgggcgcggtggcggaggtcgaagtgggcggatcacttgagcccgcgagttcgagaccagccgtggcaacagcgagactcccttctctgctaaaaataaaaaaattagccaggcagagtggtgcgctcctgttgtcccagttactctggaggctgaggtgggaggatcgcttgagcccaggaggtcgaggctgcggtgagccatgatcgcgccactgccctccagcctgggcgacagagcgaggctctgtctcaaaaaaaaaagaaaaagaaaatgagtccttaagttaccattaattgtcgtgaataaaaagttggtctcagtgagttttgcagttgacaacgaaagatgggtgttcgtgtgtgacagcgactcctggtttctcctccactttacctgccgctccacatcaagttttcttctgctggtgccactttctctgctttaccttcaaggttggcatcctccaagtaatggcgattctcattccctatctacgctcttcctatggtctttgctgaattcttggctttaaatatccctgtgccccagcaccgccccccccgccccttatttcactaattcatgttttcagctctgagctcaggatctgtaattcagacacctgcttgatttctccagacgcatgtctaatagtcacgtcaaacttgccctgcttctcaaacctgttcttcttccagtccttcctccttatttgtggccccatcttgcagggcctctcatgcttgaaacctgtgaccatcttctattcttccctctcttttgtccggtaatctgtctagcagcagccattgactctggccaaagcatcttgatctcaccttgctctccatctcttctgccgatgttctctctcgcttgggtgtctccctaagggactggctgctcagatctcaccaccctgcattcatcccattttcagccaagagaccaaagttttttaatttattgaaacactttagcagtacttcgtataaagtagtatgtgtaacgtatgtatcagtggcaaaagagaaagacagagtggacggtggcgtgcccctgcctgtctcaggtatccacccattctcccaaagccggaacagctgcctctggggcttcagccatttgcccctcccacaggtaaccccctcctgagtgtcagctttcatgcccttatttaaaaaaaaacaaacaaaataggtttgccacgtacatatttgttgctaaagcacatgtcatgtattttgtcttgttgttcctgataaaactcacggcagatttggcctctcctgcaactctctttttcttttcttttttttctttttttttttttttgagacggagtctcgctctgtcgcccaggctggagtgcagtggcaccatctcggctcactagaagctccacctcccgggttcacgccattctcctacctcagcctcccgagtagctgggattacaggcatctgccaccatgcccggcaaattttttttttttttttgagacggagtcttgttctgtcgcccaggctggagtgcagtggcatgatctcggctcactgcaatctccgcctcccgggttcacgccattctcctgcctcagcctctggagtagctgggactacaggcgcccgccaccgagcacggctaattttttgtatttttagtagagacggggtttcaccgtgttagccaggatggtctggatctcctgaccttgtgatccgcccgcctcggcctcccaaagtgctgggattacaggcgtgagccaccgcgcccggccgcaactctcttttttcattcagcattgttttatgagagtcatccaggtgactttgtgtcatgttcatttattttaactgctttatgaaattctcttgtgtgaatacatgaccacagtcccttctcagcaatgctaaaaatctaaacatctctgaaaccacagtttttggttttgtttttaacctatttggtggccaaaacctcaccaggtaaagtttaatagcctctaccacttagtatagatacctaacacatttcagtgaagaaataacgtctgatgatggggagtgcccccaaaccccagtgaggctgttacatggtaaattgtgccaaataatcgttgtacattgaagaattctgaattccaaaacccatctgcccaagggttttaaacatgcagttctgtgcgccacagtcccttggtccacgctgctgttgaatgaacgctcaggtgggtggcttccacattcctgccgctttgaacggtgcttctgtgaacagcgttgtctgtgtttggtgcatcctggtgagtttttctagaatataaatgtattaaaagtagaattgctgggttgtgaggagcacacatgttcagctttgtaaggagtaccagattgtttttgtagcacagtccgttctcctgataccagagtagaaaaagttgaagtgaacttattctttgctaagcattggcattctcagtctggtgggtgtcccacggcagcgttgtctttccgtacatgctcagtgtgggattctccggctcacagctcttccagcgctgccctctgcccttggaggagcatctaaacccctccctcagctgttatttttttcctgtagaaataaatcagaatgagttatgcagaaaaacccgatgaaatcacgaaagatgagtggatggaaaagctcaataacttgcatgtccagagagcagacatgaaccgcctcatcatgaactacctggtcacaggtaatggcttacagtgaggatgctgttgcatgaatgtgattctccctttttgaacacataaggagtgctgtagcactgaggtttgatgacgtagttatttgtgttcagacattatgaaaacacaatgctaacctggtaagtttggaagttatcatgtgaaagccttttctgaagatgagatttttccaggtctctgagacctaacacaaacccatttttcagcctttgacagttttacagttactcaaaataattgagactgttgtgaagtaagtatattgaaagcctaaatagttgatctcttctggccagtctgcaaaaatatgctggcctgtttctggaaagtatgcccaactcagaggatgggaatggggaagagcagaagcgtgcagagggaaataacagtcaggctgttcttgatgtcaactggaggaagggcagtgctgtatatggcaagaaaatagatgtttttaaaagacatgacatgaaaaatctccctcctgttagtccccagttccttctcccaaattaatctctgtgaaacttttttgggccaagcatggtggctcatgcttatagtcccagcactttgagagacagaggaagattgttcgcgcctaggaattccagaccagcctgggcaacatagtgagaccttgtctctacaaaaaaaaaatgttaattagctggatgtggtggcttgtgcctgtagtcccagctacttgggaggctgaggtgggaggatcacttaagcccggaaggcggaggttgcagtgagccaagattgtgccactgcactccagcctgggagagtgagtgggaccccatctcaaaaaaaatatttttggaaggtgaagaggaaatttaggcctataattatgtcaggggcaggggaaggggcacacatgctggctttgaaaaattgtagacactcttaagaggtgggagtcaacaggccactgcaggtatagctgaccatggagggcccctgtgctgtggaggctgagccagtgtgacttgcctaacctggcaccagagctgcggctgctggcgtctggacctattatctgtcctctcaaaggagcccacaccaacacactgggccagcagccattctgacctctttggctaatgggttagagtttttggatgggataacaaggaatgaagtatactcttctcattttctatatgtattttgagagcataacttgtaaattataaagatattaataccgagttcctgagaaagtgtggttcacatcagaggttattaattgaggcaattggagtttctggagatacaaagtctttgccttaattccttgctaactttcctagcagtgaagatggtttttctattcagagggctttaaggaagcagcggagaagtttcgaatggaatctggaatcgaacctagtgtggatctggaaacacttgatgaacgaatcaagatccgggagatgatactgaaaggtcagattcaggaggccatcgccttgatcaacagcctccacccagagctcttggacacaaaccggtatctttacttccatttgcaggtatgtttcaggagagagtagtctggtttgtgaatacttgataagttaaagttatttgcaatgattgagaaataactaggctaatttgctttaataatgttatttcaatgcatgtgagggggagaggtttgagtttgctcttttatgtagttcagaagcggttttttgttttaaaaatgcaaatttgataactcagagatgcaagaaaagtcttccctctgtgatgtacttttgattgggacctggtaccacctgccctaagtccctggcctgggtgtgtgggggtcaagcttgtctgtctctgcctccagcaacagcatttgatcgagctgatccgccagcgggagacagaggcggcgctggagtttgcacagactcagctggcggagcagggcgaggagagccgagagtgcctcacagagatggagcgtaccctggcactgctggcctttgacagtcccgaggagtcgcccttcggagacctcctccacaccatgcagaggcagaaggtggggcctgccagagggaagctttcttccattccccatgtgctctgagggggcttcgtgacaacgccaagtgtgtggctttgctgtgtggactgagagacaggtggcttctgtgcctgggatgctaagtggttccttcatggcttttttttttttttttggaggtgaagtcttgttctgtcgcccaggctggagtgcagtgacgagatctctgctcactgcaacccccgcctcctgtgttcaagcgattctcctgcctctgcctcccaagtagctgggactacaggagtgtgccaccacgcccagctaagttttgtatttttagtggagatggggtttcaccatattggccaggctggtcttgaacccctgacctcaggtgatccagtctcccaaagtactgggattacaggtgtgagccatcatgctcagcctctctctggcttttaatcttttatcttgtcaaactagggacaacggacttggtgatcgttacacagtattcacaccctttgctggtgtcttatatttatctgaaccttctttctgtttatgtcccaagtatttctcatttaaaatcctgtcttctgaaacttttctctcctcgctgctatgtttttgtctggcagaacatgacagctcctcgccttcccagacccaggtccctcttcccccgggtcctctcccgggggctctgtcctccctacgctgtcttggaaggatggcctgtcctagagtccacttgagatgttttcttgaggcttgtgaggagggtgctggtatgtcctgctacgctggtcttacctctctcccagtcccctcagcactttgttcaaggcttgctcatggcacttaactgccatcgaggttgcatgtgacgtttaacaaccagactgtgagcttccccaggcaaggactatgtatttcatgtcctgagagtgtctcgcagttaagagcttaatgtttgtttaaactgcctctttttaatagactctgctggtgctctgcgtgtatggtggtttttatcagatgtatttatattctaggtgtggagtgaagttaaccaagctgtgctagattatgaaaatcgcgagtcaacacccaaactggcaaaattactgaaactactactttgggctcagaacgagctggaccagaagaaagtaaaatatcccaaaatgacagacctcagcaagggtgtgattgaggagcccaagtagcgcctgcgcttgcgtggtggatccaacaccagccctgcgtcgtgggacttgcctcagatcagcctgcgactgcaagattcttactgcagtagagaactctttttctcccttgtacttttttttgacctggcatctttttatagggaaaaatggcctttgtaggcagtggaaaacttgcaaggaaagctgccgtctctttggcagtctgatgcagagcctgcactctggcactcgctgaagaatctggaaggttgcggtttgctcttccagtgttcgggggcctctggctgctgaaggattcggtctaccacggagggctgtgctgttaggctgcatcccactcaaaatacaggaaaagcacgaatcatgattctgctttctgttagcttaggcagacattgggccttcacctacaagtttttccttacccctgtggtttttgtgtttttttttttttctttttccataggaaagaatatataaatttgtaaatcctaattcaaagatggctcatgtgtgagggcattgagtttgatttgttttccctttggtctgggttgtgtggcttttgggggatgcgtgtgagggggctatgtgttttttaattttttaaatatatattttggtgctgtgtgtggtaagagacttgttcctagtggatcaatgaaccatctcttctgggcagttttgttgaaaataaaggtttctctttgatttcaagaatgaccaaaatggcctctaaaagatgttaatcatctcaaatgaccttttgtctttggggcgttcttccccctgtgatagcggcagtggctttttctggtacctgcagctggaaaggccacttggccctgtgctgagtgagcggccttcattagagcgaggcagcccttggccggtggggacgcagagccccagcaggtggtgcacgactgttggcggaaggaacgcgtgttcatcctcagtgatctgccctccagcatctcggcagcatctcatcctccatcgtcagctggctctgccgatgtcctgcttctgttcactcacagaactgtcccctgctccgtggtgggcaggagggaagtggtgcagggctgcgtgcattgcctgcgagtcgggacagttgatgggcacatggccttgtagctctgggcacagatgtgtttggattcattgcagcggaccaccgggcactgttgaccccactgagcagtgctaagtgttggtttagtggatgttcgtggaattgctgacccatccaagggcgtcctttggagccagtggagcctgccggcgcatctgaggggcagaatgctgctagcacttgaatctgggatctcgccttattctcaagtagcaaggcatctcgacaagcatggtctaggtctggtggccagcttgccagtacctgagccggtcgggtcatctgcctctgagggaccgtcctcaccgagctcctgcatcccttgagtgttgatcaggaggcgtccacagcattgttctcgcctctgaatgatgcttctttctgtgttggagcctggcgaagttgtgttttcaagccctctacttctctttccagtgggtaggagcttttggcagtgtttactttacctagatggcttatataatccagtaagagatgcaaagataaaattgctgcggttgttacagaagcatggcggcctccagactgacccattggttgccctttagattttgtaaggatgcggtgctggggaggtggtgcttccctaccccctagaaatgctgccttccaactaccactctcccagatgtgacccttgcgattatttcctctgaggtttgaggatgaagataagttggagggaaagagagtaactaataggggatgaaatatagcagaagctagaagaaagcggtgaggtgagagagatgcatctgcacgttttcttcaacagcaccaggtgattcagcatattcctaattacctttcactattcgtgtatataagatcgtttacttgcataatatatcatcaatttgacatattcttaaaactagagggtgtgagaagcacagcaataggaagtctctccacaaactaggggaacacaaatggggtcattcacgtgcctggactgtcactatgtggctgtcacgtgaagtgctggtgttgatttccatttcagccagtgggtagctgataagccagtgccagcatccagcatgagcagatgtcggggagactgggaagtctccagcgttactgctctccttcccttcatgataagccagtgccagcatccagcgtgagcagacgtcggggagactgggaagtctccgatgttactgcctgccttcctttcgtgtgaggggctgcacttgcttttcttgtgatctgttagtggacgaggtcttccaaggaagtgctttgcacactttctttgctcctttttacagtctttgtctttgcagcaagcaaatgaaattaagccactttgggataatgaacattcagtataattctactttgtctcattttggatctcactgttgtctttataaaaatggcacattttacaaagtagtttattcttattatactttctgctggagagtgccttgaaataaaatgtgagagtattctggtactctgtgttccagatgcatgaaattgggtgaggaataacccctagtctggaatctttgtgaagcatagggttattgcaaggcaaatgggaactaacacatcttgccatttgaatcagggtctccagtttctagaaaaggcagacactggttgggaccaaagtctccatggcacatgactgaagactggtggtcgtgtgtgtgcggagtccacggaagcctcggggaggtggagctgctccttccattccgtcaggacgtgatctgaaaacatgtagagaagatgagttgaggacagcttttctaaggcaatgtgatgtctttgctttcttatttctctttctctgcgttgttagttttgaagagtggaggagctaggggctccagaaagaatcttacacatgtgttgaagacattgatgtcatagggagcggggagctgcattcccttctgggctgttactgctaaatctcagtatgaacagaccaggcggaaagcttggtggccaagcagtctgtgtgcttccccgctgatggagaacgttgcgttgttcacaatagggcctcatgggtgtagccgcatggcagacccatggctggcgcagctgcctgttgccgtctgtcttcagtaactgctgctctgttaactgttctattctgatactacgcgtgttgttttttacaacaggtatgtttttgtttcagaaatatgtattgcttttctcatattttttgcaaattgtattgtcaacatgggtcatttaaagtcctgtatgaaccataacctgctgtggtacctttgtacatgtttgattctgtattctttattccagtgtggcatatgtgcccctctgtatcttttgagaagtgcggaataggttgcttctaccacctgttcttaatgtaacagtaaaagttttcacatttttctcagaactgttatctggaagctctcttttttcctaagggtattttaataacaaatactgatgcatttgtattgaaagttgatatcttggaatggaaggacagaagaaagctcgcctcttggaactgtagttggctctcctctcactctgacagtgctgccccttttagtttgtaaatctgtacttggtgtgtttaatttgaaacctatcggctgctctcttgactggggcacttaatgtttcataaactaatttccttggtgtgaaggaagtagaacttttgagctacccactgcatgattttaaactgattttaatagcctaagtaattactctttttttttttttttttttgcttaatgaaattttccaaacatattaaaaacagagggaatacgccagcacatcccagtatccaccagtcagcctgacacccaccaccacctgccagagccccaggcaggagataactacaggtgtctgattctgggtggctaccatgctttcagggccatgagcgtcttcatgagtggaaggcagttgtagggttcttggaaaggactcagactgaccccttcaagggcctgaggtgaaattcagaaactgcccatgcagagaagctgagcagcgggcatcatggagcgaggcgttgagagcttgcatgtttgttgggtatcagagaacagggaaggcctctcctcacctgctgctcctccctatgtggcagtggcatgtcacagtgttcttgatgttcacacacctgtgccagtccattagcctcacgggtcagaaggcagcacggtagttcttagtggaggtgggcatcaccaggaatgcttcagtgtgagctcccacactacagtctggaggctcacaccatccttgcacacatggccttcctgtcttagatattctgccttattttggaatgccatctttgcttgtggtttttcacttctgttaaagtagaacatggggtttgaatgggcctttggtgtaactagctatggcaagaatcttttaagagatgtgctctttggagatacaatgtcctgagcttgtttgccttttccagaagccacaaaatggctttgaagataaacaggcccatgctacagagccaccggcacaaggcacctggtgtgcaggagctgaggtgcagcctgtggttaattgataataatcatgtccccacatctgcacagtgggggctgtttctctcatttcacaccccagtatccaccagtcagcctggtgcatgtgtgcggggaatatttaaagggaatgtgacgttctgatttgtctgtaacatttcagtgtcacctagttcaaggccaggtttacgggtccaaattgtccatagtacagaagaccatttatcaggtgaagcccgtaaagccataggcacagctataaccaaaagaattcatgaaaggagtaacaactgaaggtgagtgggtttcctcatgtttgtaaatgcaggtcacgttgcaggctcttccgccagctgtccgtccatgcaaggcagttggtcaccccgcaggctcacttcggagatgaagagtgctgggtgcagcagcgcctcctgtccttgggtctctgtgtatttgaggtggaattgatgagcttgggaaccagggagaagcggtggagctgctgttgccttgagctgcccgtgtcaggcaaggtctccgcctggctgtgacttctgcttcctggagacacatctgtaggcgttcctcacacaaacaaggttttctccctcttgtggatcacggtgtgtgactgacagctttggtaattttcccagctggctttgaaagtgaagcaggctgacccgtcaccaagaattctctgccatggagggtcatggaagaacgggaagaggtgctggcggtcacagcagcccagggttcgtctgtgctcgtttatagatttgtgtgcccatccagtcctcactgggccctcccagttttagaaatgttgaacactagtgcttgtaagattcgaacaatgagtttaccagctctgagaaaaatgaactgctccagaaccttcaagaatgtttctctgtatcacgcccacatcacaccgaatccatttgtcgtcattgcagagttcatctttctggttttgagcaccatctcacacagttctttgtctttttccagtctgctgttgactgggttagctcagcccgaaaggtgcccccacctttgaggcagttcccgcacgtgatgtccagtaccgcggtcttccctcttgctgctgcctgtcagtcatggcagaggaaagtgtcatctgtcagtctccttttcatggactcctcatcttgagaattgtagttgggctggaaggttgcagggctaagtggggtgcagggaggagccccaggcccagggctggcttgtcttggtttacaagaagctgtgcggggtctcctggggcgtctgtggggggtgtggatgcagaggctgagcaacgggcgccatacgtagtgaggtgtggatttgctttaggaaaatctctagcatcgtctccctatagcagcacttgaaataaacaagaagttaggtgggccaggcccaacaagagggaggcacgcagccttccagaagcagaggccagtgggtgctggctgtgactgccctgtccgcaaggtcaccctgtgtccttgaaaacccaggtgttgactgtctattgtccctacataatttttcaccttaggcctcaaagatgcttgggtgcggggcagctctcagaatccaccagaagcgtggagagcctccatctggccactaccagcacccagctttataatgtccctgtgagatggccccttcacccacccagccatccctgcatggcccgtttcttcagctcatccagccttcactcaggtgtccaggggtgcctcctcagcccaacctatttgaagtaacaccccttccctacccctttcactactttgatttttgtctacctgccccagaacatcagctccaggaggaaggggactttgggtaaccagatggcaaatgtctgctgcagcatgatcacagatctcggtaggaaatcaccatcacagagtgaatggaagcgaatcacctcaaagagggtgctgttgacagcgatacgtttagcaacagtttccaaacttcctggctatgggctagggctgtttggggcaataaacctctctctgccaccatcttttcacctaccctacgtcaggatggatgaaagtatgaccttgcttttcagggtgcccgtgtctttctgttcagagggccctgggagcaggccctgcagtgcagtgggttgggctgttggagacctgagggctagggggagggagggggtaaatgtgggtctgttctaagtgcaaggccctgccttagacgtgtctccctcggcccctgggtggtggctgctgcgtggaggatggactgaggtgggccctagtggaggtgggggcaacgcctgaggagcaggccctgccgcctcctggggaaaggctgcatggttgaggccttcccctgctggcttcatccttggcatggcagcaggagcacacagagtgggggccccaccccgtcacccctgcccccgagcccagaacctggcctgtgatgggtcctcaggacaccttttgtccaggaacccaggggccaatgacaaccttcacaggcatctgctgagaagacatgggccagcgctggatttgtccagctctcccaggcttggtccaagggctcaggagtggacccatccctgccccgaaagatccattttaaaaatcagtgaccctgtacttttactctctttgcacttggttaagactttatccctgattttatttgatcggtaaggcagggactgccatcattccccattttatagacagaggacagacggccccatggctccgtgtcgtgtccaagggatgggctggcacctcttggaccaggcttaccaccagggcccttctctgaagccccagtctgaccggcctgctgctgggaatccccctctgcccccacactaacctctgctggggctgagccagggcgcgtcggacagtcagggcgacccagccagggcgaccgttggccccgctcctatggggcagcagggaccgacgtcagcagggtggggcgggcacccgagtggtatgccccgccctgccccgcctgcccgccctggtggccgtctgggggcgacaagtcctgagagaaccagacggaagcgcgctgggactgacacgtggacttgggcggtgctgcccgggtgggtcagcctgggctgggaggcagccccgggacacagctgtgcccacgccgtctgagcaccccaagcccgatgcagccacccccagacgaggcccgcagggacatggccggggacacccagtggtccaggtgtggcgggggtgaggggagggggggtgggagcggtggagatggggccgtggggagggagctgagatactgccacgtgggacgatgctaggtggggagggctgagctgggcgggctcctctggctgtggggccccctgtgttccttgtgggaggtggaaggaagtgagtgccctgtccttcctccctgccatgagattccaggaccggacctggcaagtgccctatcccagccagtgttcctggggctcttccaggcagggctatgttccccaggccaggggcattgtcctggacagtcaggaggcatacccctcgccaggtggaaccaccctgtgtatgcatgaccctgacaagcaggcgccaggacagtcaggaggccaggtagggggcacgggctggagcctgcagctggacggggttggggggggtcctgccaccacgtgccagctgtgtgctgaggacgagctccccgctggcttcagctctcggagcatttggtggtggggagaagcagggcctgggcaggtcgcctggccaccagcactgctgcctgtaggaggctccctgggcaggtgacgcctcagaaaccgggcgagatggtgaccgcgggccattggtcagctggggagggcctctgccagggagctcctgagagcagcccccacactgctgaaccccttggctctgggtcttgggctgaggccttaagtggctggaccctgggcctagactcaggccctgtgggttccagagcagtctcctgcctgcactgagtccccagggtacctaccctgaccatggcaaggtaatggcaccttctggccccaccagttcccagctgtatgagggctgaggaccctagaagtgctgggaagagttgtaggaaggcccaaaggggcagtgccaccatcggatgttggcacccagatgaagggagcgctggctgcatgggaaaagctggcagcccagatcacagccctgtcaggcgccaattagaggggagggctgccctcagcgggccctgccccttgctctcttcctcttcccccacccacgttcatccaggcctgccgggcagggccagctccccagggattcagggcctcctcactggcggctggtttgagtggctccgccttcactacgtccctcccaggctcgatgtttaaaaaggagcccttgccgcagccttcactacgtccctcccaggctcgatgtttaaaaaggagcccttgccgcagccttcactacgtccctcccaggctcgatgtttaaaaaggagcccttgccacagctcttcaacttcctttgcaggcccttattgggtagcgccaaggattctggaggggcctgtgggtcaaggctgccacacgcacgccttttcctagcccgccctcctgcagccacatcacaaaggctgggccaggcgagaacagagctggagggcggcacccacactctccggtttgctgctcgcctggcccggccccgcacagttcccttttctgaatggaggggccatgtgaccacctgtttgctcagccgtggatgctgcttctgcacaggggccgtttgctctagaaagttcacaggaagcaggctgctgggctcagggagtgcagagtggtgggaggaagctgttcaagctgcccaaagctttccggttcttggcacaccccccgtcccccgcgcccccagcaggatggaggattcccagcctggggtcctagtcaggcctcaggtagccgactgtctgggccatcctctccagcctgacatccttgtctccccggcagctgtggagggtgcccctgtgcccacctggccagcaccacctgcccagctcagagaaggggctgtggctgccgcctgccacgtagggcagattgcttgcctggaagggctgttcttgacttcctccttccaaggaggccctggagtggctctgtgttctcagtcctgtgctggcctcaatgggggtgaggatcagtgcaactgagctttctgctgtttctagctagcggccaggcagtgcggggcaggtgccacctggacacaggtcccccacctccccccctttctttttcaagacagagtctctctctgttgcccaggctagagtgcagtggtgcaatctcggctcactgcaacctcgacctcctgggctcaagcgatcctcctacttcagcctcccagctgggaccacaggtgcacaccaccacactcagctaattgttgtttttttttctttttttttttgagatggagtctcgctaggtggagtctcactctgtcgcccaggctggagttcagtagtttgatctcggttcactgcaacctctgcctcccaggttcaagcgattctcctgcctcagcctcccaagtagctgggattacaggcacccgccactacgcctggctaatttttacatttttagtagagatggggtttcaccatgtgggcgaggctggtctcgaactcctgaccttgtgatcctcccgcctcagcctccccaagtgctgggattacaggcgtgagccaccatgcccggccctggctaatttttaaagtttttttttgttttgttttgtttttttttgtagagctgaggatgtccccatgtttcccaggctgctcttgaactcttgggctcaagtgatctgcccacctcggcctcctaaagtgctaggattacaggcataagccaccgtacctggctctaaagctcctttttaaaggcacctttggactgtgtggcttttagtggaaagttaagggtgggggcccccatgtcccttctgcaagcctcgtgtgttaagtcaatgaaaactgtttacagagagcctggggctaggtaaacaacagggctgcgggtatcaaccacgccaggacagggcgtggaggccagggctgtactgggttaggcagcctggcagtgaggactgtgtccttctgtggtaacccagggagcagccagatatggggcaagccagttgtccccagagtggaacctggctgcaaatgacgctggcgaaaccacactcactgccaagttccaggacagacagcacttcctcccacacaactttctccaaactccaggggttaatggttggccctgccgtggggaggggctggagccaggatagcctctggcagagcaggaggtgtcagaggacgcagctctgggctgctggagtgacctgttcttgcctctgagatctcgcccggcctccctcaccaggattgggagtgtgagctggccggcctggctctgtgacctcgggcatggtcagtgcccgacttggtggtcttttctcccgtgggaagcgtctaggcgcagacttgcagagagtgccgagaaggccgtatacctgcccctctgtccacagcacaccgtcatccactcactcatctggggcaggttcttgggagcacacacccggggtgcagccagctccccgcaggggcagacaggaccttttgggaagggtggggtgagactctccagtgtccgactcctctgccacccatctcctggtcaccctctcccctgttctctttgaggggaacaagcagggcccggcccaggcaccttttgtggggatgagtcgttgctgtgacctgcccgagtgctggccactcagttgctcccaggagccactgtgcctcatttctggctgcctgtgttctcccaggggtcagcagataggtgcgattaggtgtttgaatgcttgccaagttgccctccatcaaagctgtccccattcacagtccatgtcccccagccctgagggaggtctctgagtgatgaactcgaagcagcagggccgtggggcctccccagggcctgaccatctcctgtcccacaggcccgagtgccaggcatggacggggacgctgctgctgggcacatgccttctgtactgcgcccgctccagcatgcccatctgcaccgtctccatgagccaggacttcggctggaacaagaaggaggccggcatcgtgctcagcagcttcttctggggctactgcctgacacaggttgtgggcggccacctcggggatcggtaactgcccatcttccccatctcctggctggtgggggccgccccactggggcctccaggggcgagtgggctggctgtgctgctgcacgcagaggatgcgactcctggggaaggagcttggtggacacagaggatgcgactcctggggaaggagcttcgtggacacagaggatgcgactcctggggaaggagcttggtggataaatctgggcagaagacccccccagaggaagatgggagctgggaggggagaggccaggcttggcaaggccccagggccctgcaggcagaggaggcaggccgctcccctggagtacctggtctcctcacgaggcagctctggggtcatgagcaggccctgtagaggcagacaggccaggcccagctctgagcacccactcaagggctgccctgagtcagggtggtgccccttggtcctgcacagccacatcctcacctccctctgtcttccctccaggattgggggtgagaaggtcatcctgctgtcagcctctgcctggggctccatcacggccgtcaccccactgctcgcccacctgagcagtgcccacctggccttcatgaccttctcacgcatcctcatgggcttgctccaaggtaaggggagctcaggcggctccctcacgctctctggcaccaggtggggagacaaggggggtgtgcacggatgtgtgtgcaggtgcatgcgtgcatgcaggtggtgtacaagtgtgtgtgtatgggcatgcccgcgtgcatgcgtgcacctgtgtgtgtgtgcgtgtgtaagtgtgtgtatggcatgcccgcgtgcatgcgtgcacctgtgtgtgtgtgcgtgtgcaagtgtgtgtgtatgggcatgcccgcgtgcatgcgtgcacctgtgcgtgtgcgtgtgcaagtgtgtgtatgggcatgcccgcgtgcatgcgtgcacctgtgtgtgtgtgcgtgtgcaagtgcatatgtccctgcagacacgtgtatgcaagcaatgtgcatgtatgtttgtgcttgtgcgtgtgcgtacgtatgtgtgcatgcacatgtgtgagcatgcacttgtgcgtgcaggtggtatgcatgcgtgtgcatgcctgtatgcatgtgtatgtgtgtgtgcgttcctgtatccatgtgtatgtgcgtatgcgtgcccatatgcgtgtgtacgtgcgtgagtgtgcccgtatgagggtgtacgtgtggccatgtgtgtgccttctgtaggtgcacactctgcagtgatacacaggatcacagggggcacctgtgtagtgaacttgcccctgcccctgaattttgtcaccaaacgccttagttcagtggtggattccagctgcaagggacctgctgtgggactctgggttttgtgcattttggtcacacgtatgctgatgatgcctccgatactagggccttggagcgccttaactgtcaggagaacaaggtgggtgggggggccaagggggctttgaggggcccctacttggctggggtcccctggagaaacagccaggcctccagcctgcaggggcctgctggccccaacccagcctgcctggccaccccacccatcagcagttccctgcctgggccactcctcccccagtgtcctgggccatccagaccccccactcaggactccccctaccttcctgagccggcatcaggttcagagcgctggccatggctcccctagaacctctgccctccctctcctccaagtccagagactttggggagttcactcccaggcctcgttctcctccctctccacaccctcactccccaaggttatggcctggaaggtgctgcctgggactgtctccataacagaggaagggggtctgcccaggagagaggccactctcatggtcacggggtgtcacatgagaacaagggcccagtgcatggcccaccctcagaagagggtgcagcgagtgcaactgaggacttaggattgtgtgtttactgtgaggccccatcccagagccagcccctccagcatcaccgcctccccaggcactgcccaggtcccactgcaggagctggaggaggaggggaggaatgaacgaatcggcaaccacctggaggggaggacaggcctggcggggggtgggggccctcatctttgtttactggagggtcttcggggtgagggaggagggtcccaaggctgaagctgtgaggaaaacagtggtgctgcctcggactgggctgaccaatgcctctaagtgtcgctgagaagaccctcggccctggggcaggcggctgtcctcgtgggcagctctggggacccagcaggcagccagaccccgtaggctcgctgccgctccagctgcgcttcctctgcggggcccagcttgttgtgctacgatgacttggcacctgaggcacattctgttttctagaaaccttcaaagtctggcacgtctcaatgtcagatgtcatcctgtgcccatgagcctactctgggggtctggggggcagcaatggcggctgcgtggtaacggtgggcaccacctgcggctggctttgccgtgtttgtgcacgctgtcttcgggcagagcagagacgccaggtgtcccaagacctgtggctcttgctgcggggcatcggacttctggagggagccccaggagctccgccaggcggcccccagcctccctcgagggagcgagggaacgggccctgcctctgagccgtgagcctatgagtgagcgctctgcggttaaaagttacaggcgctggccaggcaggcgcttcctgtgtgtggccgtctgtttgacgatgcccccctgcagggtagcatcagcgccctgtagacacggcccgtgggtttgggggacaagctcctgttgtcaccgtggctccgcggtgcctcccctcgcagagtccctccaggtcaggctcagagccctctggatgtggaggagctgcatggggtggtaaggtggtttccaaacttctaaagcggctgagaacacttggtccaaaagaaatcctgggaggaagctcagtttataaaacagggaagggcagctttcttgggggaagtatgtgtctgtgcacgcatgcggcaggtgtctgtgcacgcaggtgtgcatcttcatgcgtatgcgtgtatctgcatcagtgtgagcacaatgcagcactgccaagaagtgtgccggtgaacacgtgcgtgtgcaggcgcatgtgtgtgtgttggtgcgaggactctagagcacagctggaggccggtggtgagagtgtgcacatgtgcatgtgcgtgttcgcggggtgggagggctagcttggaagcaggggtgtttccctcagccgtgcgggtggcacgaccctgagcgagcctcacccaaaaggagtctgtttcctcagtggcaccaaaagccctgccctgctggtccctcgggtggggaggtgagctagagggacaggtggacgtcctctggaatcacagcccaaacctgagcagataggccgggaggagcctccctggatggaccctgagagaccctccctccacttgttgcaggggtttacttccctgccctgaccagcctgctgtcgcagaaggtgcgggagagtgagcgagccttcacctacagcatcgtgggcgccggctcccagtttgggtaagtcctggcctaagacggggcccaggagaggccaccaggtgagccccttgccgagtggcccctggtctgcgtgggggatgggccacatgggcttgcagggccaccatggtgaggtgggtcccgcaggcgccttttgggctctgtagcccgaggctgtgctctgcaggtaccagccccgggcaccgcgcttgctttgtgcatatttctgcctttctggagtggctggcaggtgatgaggctgggacttggggacatgggttggaggagtggccacatcatctcattttctttcatctgtgctaacgatgccagatgccgtccccaccatccgctggcccccaccctcgacaggagagtctgtgagcgcaggagcgtctgggccagggtgggcctatcagctggctggagggcggcttgtcctcagggtgggcctatcagctggctggagggcggcttgtcctcacggtgggcctatcagctggctggagggcggcttgtcctcagggtgggcctatcagctggctggagggcggcttgtcctcagggtgggcctatcagctggctggagggcggcttgtcctcagggtgggcctatcagctggctggagggcggcttgtcctcagggtgggcctatcagctggctggagggcggcttgtcctcagggtgggcctatcagctggctggagggcggcttgtcctcagggtgggcctatcagctggctggagggcggcttgtcctcagggtgggcctatcagctggctggagggcggcttgtcctcatccacgatgcggcaaccccgtgcccctcagtcctccctccctgcgcccgctccttggggagctccagaccctctagcgatgctggcggcctggatcgaggccaggccaggggtgggaggccttcccggtggttgtagcagggtggattggtgcaggagctgaccggggcttcccaatcactgggctcaggccctcgtgttactgttgctgaggttcagaggggcggaggcggcccctgtaggtggggccgggagcaggcccaggcaggcctagagtgaccagattcatcaagtaaaaacagactgcccagaggaatgtgaatttcacataaaccggaggggatatacttctactaaagaatgaatcctcacttctccgaaacccggtttcattgagtgtcttgcggtttttctgcacccaggtggggagcagagacagggtcaagtgtgggctgggctgggcagggagagtgctaccccagcccgccctggtgcccaaggccaagtcttgctaccccaggagctgtgtccaccccgcagaggctccgcgggaggaaggaggccccatctggatgccaggccccgctttggggctctctctcttcctccttttgccatgatgttaactattccccctggtgccagtggaggggcctcagcagcagatgggggctgggccgccagccaggttgcacccagaagggagcctctgaggggctatttgggacaatgaagtcatggggacgggatgggggttgttggatttggccgtcatggtatttttgcatccagaagtctttttgaattttgtcctcaatgatgtttgaagcacaaaaaccgtgcggagcttcactgtggtatatgctcatcaccgtctcctcctcggtgccgtttttagttgaaaaggatccacatgacaaattgtaggccaattggaaggcctagaagcaagatgtgaaaaacaatgtgagttccacagcagccgcccgactgggacacatgcgtggctggtcccaggttcgccccagccctgtgtgcccggagtctcccctgagtacccgaagtccttaacaaaacaggccaggacggtggcttctgagctgctcctctggaggcgatgaaaacaccctcttctccaggggctcagcctgcaccagggtggggtttctgagaggcccctcctcacccgaggggtgccgctgaggggcctggccacactccccctgtctttgcaggacgctgctgaccggggcggtgggctccctgctcctggaatggtacggctggcagagcatcttctatttctccggcggcctcaccttgctttgggtgtggtacgtgtacaggtacctgctgagtgaaaaaggtaacgcaggccgggcgggctagtcccgggcgcccacagctgcccagtgcctcctcccctggtggcagccgctgagcagcctggagcaggagcccggagacgatggctttgacctcccaaagaatccgccagtgaggaaaagcgctcgggtgctgagctgtcagcggctccgccacccaattcgatctggaaggttccatctagggctaaggcagacacccaggaagacctgctgggcacaggtcaaggcagggtgcaggagcagccgagtctttgggtggccagggggctctggaggaggccgtgtggagggtcgttcagaacgcggttctcaaaggtgatgctgcctgttaggtgtctggtaggggaggccaagggaggctggcgcccatgtgcaacctgaggcatggacgaggcctgctgacccctctggaaccacccccaaatccccaatcctttggcaacgggtggcgcctcccgccctgatagccatcagtttgaaaccgttgctccctcagatctcatcctggccttgggtgtcctggcccaaagccggccggtgtccaggcacaacagagtcccctggagacggctcttccggaagcctgctgtctggtgagctgggacctgtgccaccccttggagcagcggcagggccggtgaccatgggggtgtgaacctggccggacctgacagcccttgagccagcagggcctagggctcagagaagtgggactctggcccccaggggacgcctctcggggtgggtcccacaggcccggccagctcgtgcggcaccagagtcacggtccaccattgggccccgcagggcagccgtcgtctcccagctctctgcagcctgctccttcttcatcctcctctcctggctgcccaccttcttcgaggagaccttccccgacgccaaggtgagtcgggggctcccgcagggtgaaggagcgcccagaaggcacgaggcttgagctgcaccaggcactgtgggtccttggcctgcagatggtggaaccctcggctcctcctggactctgagggtcctggcactgccaggctcttcctctggagaggaccccgtccatgctcggggcaggtttctgtgtttgaggctggaaatgatgcgggcgctcggtgccttcctgctgcggctgcagccctcccagccctcatcgtgacctgctggcccacagaacccgacttcagagcctgaggaggccggtgcagaagccgggatgtggacagaggggtcacctgcggtcagcacggttccttctctgaggctgtcttgctgccctgccgggtggtggtcaagagctgcacattcccaggagcagggctggccctgccggagagctttcctgggcagtggtgggcacgggggcgctgtccagcctgagtatcctcttccagatggccagatgccggccctggccccctctaaggccaaactcccccctgcagggctggatcttcaacgtggttccttggttggtggcgattccggccagtctattcagcgggtttctctctgatcatctcatcaatcagggtgagccccagggaggggaccggggctggaagccacaccctggttcacctcgctttcgaggggcaggatgctcccatcctggggctgcagcttcagcacacggagagctgggacagaggggcacttctttccaggctcggcctcctccttaaagggtggggttagactgtggtggagggtctggtctcacggtgactgtggagctcacccctgggggctggatgcagcccctgaccctccaggaaggcacctggaggggtcagaggttacaagcatccttgaacctttggaagagcttctgtctttgttccatgtgctccagacccacgctgggatgagccccgagcgggctgcgtgtttcttcccctagtgcagtgtccgctgcacagacacgtacaggcggatgcacacgcgtgcccacatgctctctccacacgtgtgcctattcttagaatgttcgtgtttttcctaattgcaaaaggaatacacactcgttgtggaaaagctagaaaatctggagcagcagaggaagtggggccgctcgcctgtttccgcctctgtaactgctgtgtggctgttctgtgtttctgcccaaacccacgccttgggaaccttccaaaggcgcacatgcggcctcgcggctgcaccccacatgcgtgtgtgcacacgtttttgcctgcagcacgggatagctgtcttgagccccaagcctcttcctcccctgctgcccctctgcagccattcgggatgggaccccctctggggtgtcagcacgaaagggctaacgggagccccttccttggcctccccctgtaggttacagagccatcacggtgcggaagctcatgcaggtaggagaatcattccggtcgttctctctggatatccctgctttgttcagggtctcccaggaactcagggttgtgtccccaagtcacctgatatctgggaccaggcaaatgccaggcctctccatgtgtccagcactggggcccagaaggggctgtttagacagctgttggggggaaggctggggtcagcatcctgtgcccctctgggcccaggcctgagcttgcccacgtcgaatagggcctctcccttggagcggggctgattcttgcggagactcctcccagacctcctctagggggcctggtctgagagaagtttgtggtcgcagccaacctgaccgttgtgcggtgcgcccaggggggctttcgggcagctgagtcaggagagggccctgctgcaggcgggctgggtgcctctccgtcacggtggcgctttcctgcagggcatgggccttggcctctccagcgtctttgctctgtgcctgggccacacctccagcttctgtgagtctgtggtctttgcatcagcctccatcggcctccagaccttcaaccacaggtgagggccgactgctccatccaccagagcgccgtgctgcccgcacggccgaggcccgcacatgtgaagagggagctctgtccgcctctctcagtctcttcctcacacttcacccccttcccaagctgctgggcagtgactgcactgaagacccagtagttctttaggaaccagcaattcacttcagtgagcagcacgtgcgcgtgatttgtgcgaacatgctttccccacagcactttactctaaggagtcgcttcctgcactgggtcctccatgaagacgggcagctggggctcgggttggcatggtgtgcagggctgcagtgctctggccagtgggtggttggggctcgggttggcgtggtgtgcagggctgcagtgctctggccagtgggtggttggggctcgggttggcatggtgtgcagggctgcagtgctctggccagtgggtggttggggctcgggttggcgtggtgtgcagggctgcagtgctctggccagtgggtggttggggctcgggttggcatggtgtgcagggctgcagtgctctggccagtgggtggttggggctcgggttggcgtggtgtgcagggctgcagtgctctggccagtgggtggttggggctcgggttggcgtggtgtgcagggctgcagtgctctggccagggagcaggcctgagcgtgtcccagcccctcccgtggctccacgagaccttgcttccccgcttcccctgtgacaaccctgggccaccagctcggtggtggccagggccactcaccaccctctttcctccccacagtggcatttctgttaacatccaggacttggccccgtcctgcgccggctttctgtttggtgaggaccttgccttaccccagctttgcccctccctgggcctccgggtgggtgagccatgggggatcccggagggcttttgctgaccatccatattctctctcgctctggcctcttcacaggtgtggccaacacagccggggccttggcaggtgaggggcgggcctctgtgcccaggagttcccctgtctgtggggtttgaggccaccgaggtgctgcagggtggggttgtgcctcccttcagagggggtccgggtgtcagaggagggcacagaccccagagcaggcccaggagaggaggatggggctgccttccaggttccactggactttgctgacggcaggtggctcatgagtcgccatctgccctgactcacagatatgttcccatcctggtagcccagggtccccgggacacctcctggccccgctgagtgccatggatgatgggggtccttcttcagctcagcctcgcctgggccggcctgtggctcccattttcctttcagcgggacaaaggggacttgttaccaggccattttctggatggcctgtgagatctctgcccctccaagaccctccaagtctgagcctgacccacagctgggacactgaattcagccctgggaaccatgggggctcctatcaggcgctagacccccagcccttcccctggcactaccttgggaaccagggtggggtgtggggcctgggctgcccgggagcactcagcccgcctggccctctcttgggcaggtgtcgtgggtgtgtgtctaggcggctacttgatggagaccacgggctcctggacttgcctgttcaaccttgtggccatcatcagcaacctggggctgtgcaccttcctggtgtttggacaggctcagagggtggacctgagctctacccatgaggacctctagctcccaaccccacagcctctccaaggacccaggcgccagcagccccaggacacaggggactcagtgtgtgggacttggtcactccatgtcagacacacgagcagagaggaacacaaaccactgtggagcctgaagctccttaagaagagtccacaacagctggtgggagggtggggtgggcctgggtccagaccaggctcgctgctctctgggcctcagtttccccacctgccagcgggctcggccctgtcctcctcacaggctggtgtggccgtcagggtgggtggggttattgttagtaggcgcagcctcattcccaccacgatctgttccgcgtggttcccgccaaacctccctcggtcgccgtgttctccgcaagcctcctgcagcgcccgcctgccaatgtgaggctggcaccaggctgcagcctccccaatcccagcccactttgctgtgtctctggcgggctgtcctccttggtgggagctgtcctgcacactgtaggatgcttaaaggtatccctggcctccacccacccctagccagcagctcccagtcagacaacagccagaaatgtctccagactctgcccagcctccccaggtagccaccctcgagacacgacctcagagtctctgtgtctcctagaagcctgacagagacccccagggcagtgggtgggtggcgggctagagacccttgcctgtgtccgggaccctggcgccgctctcccctcctgtggatccctccgcactaacagtgttctcagtgggcagacgcctgggcaccccttgggccctgcccagcatggccatggcgcaggctctcgaacccgcatggctttcccaggcctggtgattctgctctccagggacggttggcaccttcctcgggggcgggccccacgcaccccagaacacacagacccacctttctggcgttctttctacctcccttttcgttgcctgaggagctggtggtttcatgagttaatgatacatcttgcaaggtgtacacatagagaaaaaaacctaaaaatgtggaaaagcacgccaaagccttatttaaataataactattaaactattcaaaaagaagactgttattttatttaacacctttgttttttaagaatgaacacgtgttaaagactttctgtaactaatttcatgaggaaacgagtgacacgttggaatcaggtcaaaggagaatcccaggaacggactcctaggccgggagtgttgaaatgagcatgccagcagagccaggctgggtttcggggttcctttgccgccaggggtcctgcgtgtccacagatgacagcgatgtaccctgctatcagctgtccacccagctttcccaagatgtggggcccccatggagtcagacagcccagctgtgctgtggaaagacaaagtggagttttgcacttgagcacaaatgttcccctacaatctctccagtttcggtcagcccaaccctgtggcaccatgggtacagcctagagcatcacccccacagaggcttcgggacggtcctgctggactgctggacgctgctgtggggtcttggggcaggaggggcttccagaagcctggcagttgctgtctggaggccaggaagccaagcccaggaagcccacctgcggctgagttcagaggtggggcctgtgcgttgtgaatgaattgctgtctctctcctcctcatcttgcactaaatctacataacttaaaatttaccattttagccatttttaagtgcacggttctgtggcattaggtacattcgcattgtgcagccaccgccaccctccgccttcagaactttctcatcttcccaaaccgaagctctgtgctcattaaaggctagctccccgttgctctcccccagccccggcaaccccattccactttgtgtctcgaccgtaagtgtggctgctctgggaccagtgccagtgggcgcacgctgggtttgcctacgtctggcttacttcactcagcagagtgtccttcggttttatcagttttgtcacaagtgtcagcatttttctcatttttaaggctgaataaaatattgtgtggataagccatgttttgtgtatctgttcacccattgatggacctgtgaacacgagtgtgcaattagcaccttttatttttattttatttattttttggagacagaggctcgctgtctcccccaggctggagtgcagtggcttgatctgggctcactgcaacctccacctctcgggttcaagcgattcttctgcctcagcctcccaagtagctgggattacaggtggctgccaccaagcccggctaatttttgtatttttagtagagatggggtttcaccatgttggccaggctggtctcgaactcccgacctcaggtgatccacctgcctcggcctcccaaagtagtgggattgcaggcatgagccaccacgcccggccccggccctacttttttttttttcttggagacagggtctttctccgtcacctaggctggaatgcagtggcacaatcacagatcactgcagcctcaacttccctgactccagtcgatcctcccacctcagcctcccgagcagctggaaccacaggtgcacaccaccatgcccagctctcactgtgttgcccaggctggccttgaactcctgggctcaagtgatctgtcaccatggcttcccagagtgttgggattacaggcatgaaccacggtgcccaaccagtcagcaccgtctaaaatccacagccagctgtaaaatctctgagagcaaggaggcagcccctcccagggaactggagtggagaacccagaagggatacaggactaggtgggcagtgcggccgccccttgggctgcacagtcctgcaggaccaacattcctaggccctctggattctgtggagtttctgtcacttccttgcagagtgggggctggggaggccgtcatgtgggatgtgggggcgcaggcccaggcacggcaggcaggcccacccccttccctcccagcagcttctgggtgccacctccccggcctttcctcaggcagatgttggagcccgagtcagggagactgtgggtggtctgcttgttctccagctccagcagaggggatggtggggtctgcatgttgttgtctgctgcagacaggcccagatgccatctgcaccccgtggggcagctctgcaggatcgtggtgcaggagctgtgggagcccaaccccctggccccccagtctggaataaggtgcaccgcgggatggagctcctcagccgcagagtgagcgctgatggcagagcatgctcgtccattcgcccgtgtgctggctccttcttccaggagctgttcggccatagctgctgactgcctctgccaggtcagctccaggcttgggtggcagtcctgacacggctggggcgcaggggccgggacgtgggcgggaatgagagggaacctgcctgggaaggctggggaggagcgtccaggccccgtggtcatttgcggaggtagcgagtggcagggcctgcttgggtggattctgagcctggaggcctctatgcaggccagcacagacagcctcgggcaggagactcccagccgcacacaggctcctggtcctccagctcggtgcccgccctcctgggaccttgctagaaggcagaacgtgctgtcagtgccacgtcagacccggctcccaaagcccccccacctcagatcctgatgctggcccacgaggagctcccatttctgggtctggattttcagaacccccccaacaaaccactctgctgctaggttggagccctgcgggcagccgaaagccaggaggaggcagcagggcccacggcacctctcatcagcgcccttgtgccctggaagcaggggctctggccagctggggctgtgtgtgggagcatgtgtgtctgtgtgtgtatttatgagttgtgtgaccctgtgtttgaatgtgtgtaggagtgtgtctgtgtgtgtatgagttgtgtgaccctgtgtttgaatgtgtgtaggagcgtgtgtgtctgtgtgtgtatttgagttgtgtgaccctgtgtttgaatgtgtgtgggagcgtgtgtgtctgtgtatttatgagttgtgtgaccctatgtttgaatgtgtgtgggagcgggtgtgtgtgtgtatttatgagttgtgtgaccctgtgtttgtgtgtgggagcatgtgtgtctgtgtgtgtatttatgagttgtgtgaccctgtgtttgagtgtgtgtgggagaatgtgtgtctgtgtatttatgagttgagtgaccctgtgtttgaatgtgtgtgggagtgtgtgtgtctgtgtatttatgagttgtgtgaccgtttgtgtgtggaagcatgtgtgtctgtgtgtgtatttatgagttgtatgaccttgtgtttgagtgtgtgggagcgtgtagtgtctgtgtgtttatgagttgtgtgaccctgtgtttgagtgtgtgtgggagcatgcgtctgtgtgtgtatttatgagttgtgtgaccctgtgtttgaatgtgtgtgggagcgtgtgtgtctgtgtatttgagttgtgtgaccctgtgtttgagtgtgtgtgggagaatgtgtgtgtgtgtgtatgagttgtgtgaccctgtgtttgagtgtgtgtgggaggatgtgtgtctgtgtatttatgagttgtgtgaccctgtgtttgaatgtgtgtgggagcgtgtgtgtctgtatttgagttgtgtgaccctgtgtttgagtgtgtgtgggagaatatgtgtgtgtgtgtatgagctgtgtgaccctgtgtttgagtgtgggtgcgcatgcacgtgtgtgcacgcatccgagtgtgcatgtgcctgagtgtgcgagttgccgcatgtgcgtgtgcgtgtgaatatgcacgtctgtgtgttcacgtctgagtgtgcacacaacctcaggacctggccgtggcggtcattcgctgtcgggccgacagagggtgccgtcggacagggctgtgccggctctctgagctcccagcaaagctgtctcctgcttgggactcagcgtgggggaggagccggccgctctgctgtgagagaagggaacgggttgcgagggagacctacgaggtggaggaacagcgtgggggatggcagggggcaaagtgacgtccagtttggggtgggaggagggagagtgtgaggcccaggagcgggacgcgggggagggggccgggcgtgggcaccggatcttctcaggactggtgggtgtgcctcaggggcctgatggcctgatggacggagggcaagaacccttccaccatccgctccgtccccagcctggggcaccacggcgcgtccttcccccgggtgcgcagcgtgtcctgcctcccccttaaaggacaaggggcagaatcctggcccagggcagagctccaggctctcctcgccgcccctccccatggtccagcacgcccccatgcccttcccctcaaagaccacagggcccagcagggcagggccgggctgcagtgtggacagacggctcgggtaggagttctgtggcgggggctgcagtcccggccccatccaggacaatcatcgtctaaggagcggctccgggtccgcgggcttggggaggctgggcgaggcacagggctgtgggcacgggatcaccgaggacaccagctcaggaacacgggctggggcggggtcacatgcgggcggtgccagctctggtggtccgggcgctgcagtgcccaccgagctctacgcttgctctttcccacgggactttgcatgaagatttcgagtccctgtgacggggagtcctgttggaaatatttactattgtgatgaccggtccggagaagctgggaaacacagaggcctgtggaggggagaaccagtttcccggcgcgctgcagttgagccgtggctgcccctgccagcctcgcagcccacaagccctagaggccccatcctggtcacttcccggcttctccccaagcccactgccctgagtcctcccgccccaccccccgcatgtccctccagggctggggctgtgcctgcccgagctccctgacccccaggtcctgtccccaggcccggaccgccccacgccagcctccccagggctctcctactcacctcccctcctggtaagaggcacttatctgtcatttcttttcttttcttttcttttttgagatggagtctcactctgtcgcccaggctggagtgcagcggtgcgatctcggctcactgcaagctccacctctctggttcctgccattctcctgcctcagcctcccgagtagctgggactacaggcacccgccaccacgcctggctaattttttgtatttttagtagagacggggtttcaccatgttagccaggatggtctccatctcctgaccttgtgatccgcccacctcggcctcccaaagtgctgggatta[450 bp omitted]tattcagcgtcgccggctgctggcgcggagccgaggtctgtgttccgacgtgcccagcagggggcctgtccgagggggagcgacggtgaggaagctatttattgaaatagcttcattaattagtaattaacagcagggtaatgactatgtcacacatcgtaattcagtggatgcccttcatgtgttatgaggcctttaattaaaggacgtgcattttaattaaaggggtgcttggccctttggcctttgcaatacaaaagacgctctcaactttcaaagaagctgacagggaggctgtgctcgtgcatggagtgggggctgccgggggtgtccaccctcagggcacgcctcgccttccagcccagctctggctggtcctccttggagtccattggacaacctggtggccatgtggggtacaggaggggccctgggccagacagccatggatggggaggccgaggtccctgtgaccccccttggggtccaagcactcttctctgcccccgcaacttatctatctgtgggttggaaatatagtgtctgagaggcaccagggacacttgtctcccacactggtttgccaaaattctagggtcttcccatcccagcactgcctgggcacctttgtgcccatcgtgggagggtgccctgctgaggctgttttaaaactggcacccacattctttccctcaagagatggagcctgtgtcccctccccttgaatctgggggtggggacttgtgactgcttctgaagctaaaatgtgatttctgcagcttctgcctggatatcctgggcactcactcttgggacccggccaccatgctgtgaggaagctgaatcaccccacgcaggagccacctggagaggccagacatgcacctagggtggggggagggggtgtctgagctggttggaggagggaaggctgttcactgagagagcagacccaggagccccagtggcagaaggggcccggcagggagtgctgggcagggagcgcccatgtgcccacccgagtgccagtgccagccagctgctgcccggagagccccggccctctgtagctatctggcctctgctcatggctgttgctcagagagaatctgaccagcactgacttcacctccgcccaccccctgaggcggcagctggacctcagcgttgcttcaggaagaagtcctcagccaatagtgtccatgccaaggacaaatctgagaggccactaaaaatgccagagacatgcaggataaaatacagcctgtcccattaaattattgatgcctttaacattaattaccatcctccaaacctgcagtggctcacatcttccctccttcctccggcttggagaaccttcagctagagctcaggctggaaatgtattttactgttttccctgtgcctctgtcatgcaggggtcttggaggtgcactcccaccccagcacaggtgccacaggactgcctctggtgcccttgacccacccacaccagctccacacccacacctccccccaaccttcccccagcaggcgcaggactgcctctggggcccctgactcacccacaccagcctctgtgatgtgggggtcttgggggtgtgctcccaccccagcacaggtgccacaggactgcctctggtgtcctcgacccacccacaccagctccacacccacacctgtccccgaaccttcccccagcaggcacaggactgcctctggggcccccgacccacccacaccagccccacacccacatctgcccccaaccttcccccagcagagaggctccaggtctttctggccccttctccccttgccatctatttttatggctgcctataggaacgttttccatgaatggaatctggaactcccacacagacaggcctggtgctggggtgggtctgacggtgtcgtgtgagttacctctgctgccctagcggggtcctgtgacagggcagcctaaacaacaagaatgagttttctcagcggggcacagtggctggaatcccagcactttgggaggccaaggcaggaggattgcttgaacccaggagtttgagaccagcctgggcaacatggcaagaccttgtctctacaaaaaggaaaaagaaatattagccgggtgtgggtgtacgagcctgtaatctcagctaccccagaggctggggtggaaggatggcttaagcccaggaggtcaaggctgccatgagctatggttgcaccactgccctccagcctgggcgacagagcaagaccctgtctcaacaaacaaaaacaaacaaacaaaagaaatgggctctctctcagctctggagcccagaagaccgagatcaagaccaggactggttcctccggaggccactctcctccctgtgtccttctggtcatccctctgtgtatgtctgtgaccaaatttcctcttctgatccagccagactggattaagaccaaccccagtgacctcagtttgcctttcttacctctttaaagaccctaactctaaatgaggctgcacctgaggtgggagttagggcttctgcacaggaaggggagggacacagttcagcccagcacagcgaggctccattcccgcctgccctggacccagggtctaccaagcagcgaggctacccgagagcatacgacagcctggcgctgccctgacctccttggggactgaggggtggtggcgacagacggctcacagctgagtccctctcctgggtctcacgctagcaagttgacgactggtcagcatgggggacaaccccgaagccacgggggctccagagcacctgtgggccgcagaagcttctgtcggggctgcatcgcaccccaactcctcccccgccctgccttgccccccagccccaggaccctccgtcggcaaatctccatctccatcaagtttgtgggggcccagcctaaggcgagaccccaagccccttgctgggagggctcccagcagaccctccctattaataaggaaaaaaagccaaaccgagttgagaggaccacggcagatgacatgttcggccacaatgccacaggactcagtccagccaggaggaagctggggacagatggagccctagggatgggcccaggcaggaggtgctactgcaggggatgcgggtctgtggcgagaggggtgacacaggctccagagcctggaaagcagggcccggagggtcagcccacagaaagcagggcctggagtgtcagccccacagaacactcacaagcttggaggcgccagccgcgctgctctgatggctgcgccctgtgtgcaacggtaagctgtgcctgcaacatggactgttattacgtgtcattataaacagaatagaaacccccacctgatgccacgcccacacccactagaatagctggcactgtggccacgcccaatagaatggctggcacggtggccacgcccactagattggctggcactgtggccacgcccactagaatggctggaactgtgacccacgggaggatcaggagggaccgaggctgtggaggggtcctaagagcctgcctggtgtcggggagctgctgatgcccctgttaaagtggagcacgtggaactggcccccgaaccgtccccaccaccctgctggggcggccggtccctgagtgggtacgaggccagggtggggtctcacagctcccgtgggccatctcccctcctggcgcacttcctctttctggttttaggatgtcaccttgatagacgtcacagaaaccgcataccgttatctgagaaagtaaaacacacgagtgagcccaggcatcctctggggtttggtcagtatccttcgagctgctgggcgtctgtgcaccgcgggttcccctgggccccctaatgggaagcgttctcctgccgggtcgtagggtctcctgtcaagggcagcggctgtcccacccccatctccctctgctgagacacctctgctcggcaccccgctccctgggcctcgccagggacacatagcagggggctgtgagccccagaggccaagaaaactgctccctgcttccagccccagacaccacctcgcctgtcccaggtggctgagagtgggatctgggattggctacttcctttgggcatctccctgccattcatacccaggccatcctccttccttcctcccccagggccaggatggtcccaggcaaggatgagaggattgctcacccgagcaaggcccgaagcctttcctgaagctcatttgggcaattggaggctggaggtccccccgcccagcccaggaagactcagcctccgccccctccatggcccctgagtctcagttctgcttcggcagctcctcctgtccccaagcgtcctctgttcccgcagcctgagccagcatggggaagctggagacaagccctgagcagccgggcccctcctcctcagggacccctccggagctgggcacgggcagcacttcctcaccccgttgtcctggggggccgagcttggtggatggcagtgcccagggacggggggaccctcggaggccggggtgtttcctgtggacactcagtgtgggcttctcacggggcctgaggggttttcagcgaaggagttgcctccgccctttaggctgtttacgtgctccccgtgccaccattttctccccaaatagacaatctggctacaggctcgggaaggcaccggcgcggctgaccgctgcccccacgctgaccctaggacggtctgtctctgtgtttttgccagcatcccatggagcggatggttttaggagggactttcttggacattcccttgctaagccagggaactcaaggatcagcggtcacgtacccagttttcaaacattttccatttctacgtttaattggaggaaatgattttaccaacattaacttttttatgtggaaaactacgaacaagacttggccactgtcaaaatttgccaattatcacgccccatctctcttgggcgccttcagtttcctggctgggtttgaagctctagctgatgtcaagtggaggttattcttccattggcctttagtgggtgacaaaggtgaccctgagctcaacagcaccacgcgggccccaggcaaaagcagtcgaaaacctggatcacgaatgtttggggcgcaaacagctgagccagggtctcccaataagagctgagaacacatactggctcctgtgcccgaccgaagctcgatgccctggctggtcctcccctcatcgtgcgagggccaaggacgtggctctgtctggctgggccctctctgccccctctgccaggagggctgaggtgatagcagctctgcccagagtggagtttcctgcccctcccactgcaatacaaagctcatgatggtcttggattttgcatattgatcagtccatacagagcagtgaccgtgggcagcaagtggctcaggctcgtcttgtccctgggcaagctggggcctgggagaggacagacagatgctcaacactccagcacgcagagcccctcagcacagctcaggctccttcattagcatccctgcctgccgtgcagacccacccagggtcacaggctcctgtccctagtcatctccaggattggcctaattggcggcttttcggcagctctcagagagaagggtgaggcgctgcggccatcccctcgtgggcggagagctgccgtctcagccagcgttgggggggaccctgcaggggaggcgaggagacaggactgcctgccagccctgcccaaccctgccggctggtcgctgtctagagctggcaaggaaactcggtttgtttgcagaaaaacgaagagaggagaatagcccctgaactcatgcagcccacggttgccagatttgactgggtcctttcagtccagcggccccaggcagggacaggtggcttccctgccagtcctggtctgaaccccacgggcgagggtcctgcagtcccaaccctgcatctcaggctcaagtgcggcccccctcgctgcccagctcggtggctgtgcctgctcacggggaggccctctctgcgcacaaaccaccggtgtctgtcccggacagaatcagtcccatcttcctttgctcaccagcacgattcaaagggggctgaagaataaatgttttcctaagttttagctgacattcaatttcaatgactttttaaacaaagtagctgttaaacgtgcaatgttttatggtttcctgatgtctgacaggtgtttttgcccatgtgggaagcagatgctaatcgcattctccctaatagctcataaataataagcactgagtgttccctttgtgcgccgtgctgccagtggccaatttgttcttcagaagtggccacgctgcctgtcaatcagctctcgcccgaggcactttttggtgattagaagccccttggagagcgagaactccaaattagttttaaataaaaaataagaatattcatgctgctgaacatctaaaggtaaaggagacaacacagtccaaacctgcggcctaggtccggcatcgctggtggaggggccgcgcgcccagacccaccggggtccccggggacggggacgcggacggggtgcagacggcaccacacagagaggcacggggtgggggtgacaggcacggagccgcttggcgggaggggctcaggcagcctcctgtcggctgaaacgcgcggccacacgagagctcggctgcgttccgggactggcgtaattggcaggctccaggcaagagcgctcatgctgactggcgcctttgctgggacttgaaagcaggggaggggatgtgcctgtctccttgagaggagaacaaatgttccctttgaagaagtttgcgatgagcggggccagtgtcagaggagatggcttctggggtggcgggcggtggcggcaggtggcgctggccctgcccctcccccctctcccctcccccccttcccccctccccccagcaacctccgtgggtctctcctttggggcagtctcagctgggtgggcgccgctgccacccgcgtcctcaaagtcactcttgctgttgtcccttctgtgcatcagagtggggccgtgtgcgcccttctggggttcctgctggactcccctcggccccaggctctgtccgtggtgcagggaggtcccgccatccacccaggctcagaaaatagcatgaatcagctcatgcagtggggaagtgggaccctgggctaggggaagccaggggcagtgtcctcagggtagagaggccatgaagagctggggagggcaggcagggcttctggaccagtatgggcaaaggcccggtgggttcgggggcggtggtttaacgcctctctgtgagaacccaggatgggcgagggctccaaaggtgagttggctacacagaaccctccagaatcttttgaccctcactgtgctccttccgacgctgagggtgacccactctgagacctcggggctgtctccctccttgccagcgtagagcctgtggaccatgggtgcaggtgtggggcctcagggtccagtaggccagggagcggccagggagcggccagaccaagacctgctggggggcagtgagcaggctcttggtgggacagactgggggaccgtgactccacttgggctggggacagcagagggctctgggcattgggagaagggggcaggctgagagaggggcaacaggaggcagcaggaacaggctgggcccatctgaggctggcgaggccttgagtgcagggaccctggaaggcaacgggcagtgcccagctctggcctcctccagaagtgccccgacagcaccagctgccccaacccctccccacctctctccacttcctcccaggggtttccttccagcgaccacagctgccaggccacaagcttggggaggatccccatctctccagaccccacccggttctccacactgagggtgccctgccctgtgccttccctgtgctcacaggctctgggggtccctgacggccctgggactgggcgtccttctctgctggatgccagagctgtgagcccaaggggccaggagtgcaggctgccctcaggatctggcatgagaagcctccgggttctcaggcctgggggcaagtcctgggactgagcaccgtctccactggcctaagctgtgggcagtggggagggaacatggaggaggtcacatgtttaagtctgaaaacaaatgatgtcctcccacttcaccctgcctggcccccacagcccacggccactgcccccaggaccatttcacagctataattcttgtccttcctggctttccaactaatgcattgtgattaggctatgcattaattaataggcaaagacaaatccatttcatggtgcatgcattctcgagttggcttccggaggctctgcaggagggactgaagcctggccgggggaggtgccggtggctgagcctgctcccagtcgatggctgaggacccggccgcacctcgatggctcacacggtcagggaacccgggttgtccctggaagggggaatagggaagctgtggaacccatgggtggccttaaaggtggctgcgaagaggatgggggatggtggtgcctcctcacctgccctcacagaggactgagggccctgccccaaaactgcaggcctgtggcctccgtggcgggcacacaggacagggtttccatcacagagatttaagctgccctcatcactcccatccccttcctacaatggcatcccccgcgctcagggcaaagagcagacccctccctgtccccagtacaggccccgacctccattccagccagggcacctggcaccgccctccccaatcttagtccccctcccccacccacacaccctttcccctcccctgagcaccctcattgctgcctcagggccctgcatgtgctgttcccctgcctggatgcccacccccaagggtcacctcctccaggaagccttccttcttctcaggctgagttggctggttactgctgtgcctgctcttgactggggattctaccggggcgaggccaggctgctcttatccatcgtcatgtcctcagtgggcacacagagacctgtgaccatcagtcagtgtgacagggttaaggctgctaccatcgacatcagtgccatctcttctttgtgattgtctttgtaaagaatgtgccaaaatacacataacagaaaacttaccatttcaaccactttttttttttttttttgaggcaggcccaggctggagtgcagtggtgcaatcacagctcaccgcagccttgacctcccaggttcaagcaatcctcccgcctcagcctcccgagcagctgaattacaggcccgcaccaccacgcccggcaaattcagccattgttaagtgtgcttttcagtggcattaaggacattcacaatgttgtgcaaccatcaccaccatgtacttccagaatcttttcaatttgtcaaaacacaccttgtacctgtaagccatcactcccaaaccccgcccccagcccctggcaaccaccaatcgacttgttgtctccgtggctttgcaatttctgacatttcatgaaagtggaatcacaagtgccctccgtgtccggcctcttccacagagcgttgagttttcaaggttcgtccctgttgtagcaggaatccgtgcttcacttaggctgcaagggcgtaccatggcatggaggcacctatgggtggacggcgtttcgctggtctgtcctgggctgagggctgagggctggacacccccacctggctcccgtgtcctgttgaagaggtgtcgaatcttcgccgctctcgagatgcacgtgtgcagctttggccgatcccctgttttcagctgcaactgtctcccgaagtcacagattcccccttggtctttggtgtgcggggagggctacaaatcctccccaagaatgcccaccctgcccccgactggggcagattctggttatccataggaggcccctcctgccaggacagggcgcatcctctccgcctcctgacctccctgccctgtcctgggctggagcagccaagccctgagctggcgaagcaactcgagctctttgcatatgcgtggccgcccgagtctccagctagcccccctgccatactactaaatattttagcaaataaaaattttttaaacgtgcggccagatgtccaggttgacaaagtgcttaaggcgtttgactgataaaaagctggaacccttggtaaatggggatttaaaacaagccctgaggcaagtgtgtgatattaaaaacatcctgggctcttttgtgcagggcccgggtgcacagaggcttgaaggcgagcgtccatctgtcgccgccgtgtgtcctgacactcaacaaagctggatcttggagcggtggctgctcagcagcaggcctgggtggctgggcgcacgctcaccacaaaggaggtgccatcaatattcatgagctgggcctgcgtggctgggtttacagagaggacgaggcagccacaggccagacacctctccgtggcactggttctgggccttggctggcagggaggaacaagttctgcctccagagtccctgtgagcctccgagaaacaggccaggactctacagaggccacagttctggaatggatgaggggtagagatcagcccaggctccatgcgaagccagaggctccccagactgagaggaagcgagggagagagaaggccctggaaggatgagaggccctgggagggaggcccaggcccacacaggcaccctttgcaaacaaaaaaagcagaaaagctgagaacaatgagggagaacacctgtcagaatccgtgaaaagcctgacctcagctgtttttaatgcagaggttgattttcacacaatgcttgccaagtgggtggaggccccaggggactgatgggagtccaggacaggggacatcatcgacacacagagacgctggtcctttgtggtctgacctgtccatccatcacactctgatttgctgatttcagccagtatcaccagggcttcgcgcagggtctacagcgctctcctgaggccctccccaatcatcttatgccatcctgacacggaccacatggaggactggtgccttaagaggcggggcccgggcgggctggggaggactccagcgtctggaaaaggcctggcctcaagggagtcctggccccggcttccccggcatctgagcatctgagaaaggccactgcacgtggttctcaggctgccgcaaggactccggggacacatttagctccagggcctggcgcctgaaccagggtccagtctggacctgggagctggctgacatgggtgaggccaccccagttcctcgcccgtcttggtcccagagtccttctgagaggacccgctgcccacactcgtctggggtggatggaggcaagtgtctccttcctgatgttagaacacgaaacctgacaggtgcttggacctgggggtgaggtggcccctgctcaggtgaggtgctcaggagaggcaggcaccaggcagtccctcggggccccacaaccacagtctttcatgcaaacttgttgatcttgacacctgcttggcccagctctgtcaaagtccctctccctggtttctgcccaggcaggctaggggacaccacaggtcatctcttcacaggagctggcgctgtgggaggtgagaccttccaacctgcgtccagccctctgctggaccttgtcaggcctgaggacacctctcctaggcctagaaatgacctacagtgaggaaacctggggagaggggccggggagcaagagcaggcacttcgggctctgaggatgaggtgggatggaggagagcctggggctgtgcagcagggcaagtggtattgtgcagctgggcagtgggacagaacaggtggactggggtgcaggtggactggggtacagtgggaagggggcataggtgggcagagggtgcaggtggtcagtggtgcaggtgggcactgttcaggtgggcagagtgctggtgggtaggggtgcaggtgtgcagggggtgcaggtgggcggggatgcagatgggtgggagtgtagatgggcagaggtgtaggtgggtgcagtacaggtgggaaaagggtgatggggcagagggtgcaggtgggcagagggtgcaggtgggcgggggtgcgggtgggcgggggtgtgggtgggcagagggtgtgggtgggcaaagagtgcgggtggactagggtgcaggtgggcaggggtgcagttgggcagggggtacaggtggctggagtctgacatgggggtgatgtaggcatgggggtgcagtggcctgtgggtgtaattctccactctgccctttattcaaatgcaaatgtccagccctgtgagttcagagccttggaactaggaaactgattttaacaggggaaaatgtgaccctagaacaggactatcctcctgaacactgtgccagttggtgtctgcgaactccgccctgttgtgcattctcacttctaagaggttgtccacccctcctgggtgtctgtgggcctcatctgctgagcccaggggtggcaggagccacgtcttcaccgtcatttcacagaccaggatacggaggctcacagtagtcagcggcttgcctggtctctcgggcattggttcaggctctggcccctgccttgcagggatgccccagtctcctatcccagcctgcaccctcctgggggccacgccagcatggtggggcgagagggttctgcagagagagcctgggggcacgtttgggatcttagccctctagtgcccttccattttctactggggcaaggagcgtgaggctccagcatcccctccagaacgttcttgtggaagctccgctttgtttcagaacaatggaagcttaacataaatatgcagaggaaatgtgacgtcacagtttttattgggacctggaatcactcctgtgatagagtcattacctgggttaagctcattaagttaattaacgtgagcgttattattgctgataaaagatagtctcaggggattggtagagccagcgtagcatgcaggggtgggcacaggggggatggggatgggggactcagcagagacagctgggggacccggggacccctgctaaagctgcaaaacacaatcacattctcacacccgggctgcccccaccctgaggacacgggtgaacacggagctcgggggacacgaccatccagcgtcatgaaagccaggcgtgcgagccaactacttgtacctgcaggacaggaacagtgaggatagagcgatgggcacagacctcaccccgaggacagaggtcattgtcaccaaagacccccgagagaggacggcgattggtcttgaagggtcgatgatggacattccttcgtatgtggcccctcttttgggatgttcgcttctaactccagagctcggagactcatctgaaggttgaatttagaccccatcattatttttacatgtgtggaaggatctttgggtggttttctttatattttatattattttattttattctattttatttttttgaaactgagtctccctttgttgcccaggctggagtgcagtgacaccatctcatctcactgcaacctccacctctcaggttcaagtgattctcttgcctcagcctcctgagtagctgggactacaggtgtgcgccaccacgcctagctactttttgtattttttagtagagacggggtttcaccatgttggccaggctggtctccaactcccggtctcaagttatcctcctacctgggcctcccaaagtgctgggattacaggcatgagccactgtacccagccttggtggttttctttaaatccttgtcagtgaactatctgagtgtggtggttttaaaatgtcccccatttttgtggacaatcctccctcaaaagcaggttttcttaagtgtgagccagacttagcaactggcttctcatgaataaaatgtggtggaaggggccgggtgcggtggctcatgcctgtaatcccagcactttgggaggccaaggtgggaagatcaccggaggtcaggagttggagaccagcttggccaacatggtgaaaccttgtctctactaaaaattcaaaaatattagttggacatggtggcgcatgcctgtaatccccgctacttgggaggctgagacaggagaatcacttgaacctgggaggcggaggttgcagtgagccgagatcgcaccactgcactccagcctgggtgacagagcgagactccatctcaaaaaaaaaaaaagaaaaacaaagaagtggtggaagggacagtgtgacttccaaggtgaggcgctgcccgctttgggagtccacgtggcgaggaacagaggccgcctgcctgcagccgcggaaaccctcctagaagtggatccttcagatgagccatggccagcccctcgacagcaacctcctgggaaaaacgtccagctaagccacaccccaactggaagtgggtccttcagatgaccggagccacggccagcacctcaacagcaacctcctgtgaaaaccacccagctaagctgcaccccaattcctgttcctccaatactgtggtcagaggggctcaaagcagaatgagtccatcttgagtagggagtgggtaaaatgaggctcagacctgctgtgctgcactcccaggggtgaggcattcggagtcacaggatgagattggaggtcggcaggactggtatcacaagatgcaggtcataaagaccctgctggtaaacaggatgtggtagagatgccggccaaaacgaccaaaaccaagacggtgagaagagtggcctctgctcacccgccctgctcattacacactaattataataggttagcggctaaaagacgctcctgctagtgccatggcagtttacagatgccacggcaacatcaggaagttacgctatatggtccaaaaaggggaggaaccctcagttctgggaattgcccacccctttcccagagaactcatcaataatccaccccttgcttagcatataatcaagaaatacgtgtaagtgaccttagtcagcagcccatgcggtggctctgcctatggagtccccgttcttttgttcttttactttcctaatttactttcactttatggactcgccgcaaattctttcttgcatgagacccaaaaaccctttcttggggtctggatcgggacccctttccctgctcgtcttctctgcatcagcccagaccccacacctgtttcctggcgtggacatggaggactgaggccatcctcccagccactgacacacgccccttctggggtggcccggctggcattgccttctcctaacgttcccggggtggcccggctggcattgccttctcctaacgttcccggggtggcccggctggcattgccttctcctaacgttcccggggtggcccggctggcattgccttctcctaacgttcccggggtggcccggctggcattgccttctcctaacgttcccggggtggcccggctggcattgccttctcctaacgttcccggggtggcccggctggcattgccttctcctaatgttcccggggtggcccggctggcattgccttctcctaacgttcccggggtggcccggctggcattgccttctcctaacgttcccggggtggcccggctggcattgccttctcctaacgttcccggggtggcccggctggcattgccttctcctaacgttcctggggtggcccggctggcattgccttctcctaacgttcctggggtggcctccaaggtgcttgtgactttcaggagagcccagcaaggccaccctccgtgctccttggtctgagcatcctgaggtggagggtgcatgaccttctgttcaagaatgcaaatgcctggaccaggagagcgtcggtgtgtgccagagagccgcctccctgcatactttccaccccaggcaggggctgcctctatggggccagccgggagacttgcctgcagctgccttgggccctgagttccggctcctccgaaagcagcaggaggccctgggtctccttcacccgccaccaccccatctgcaagacgggaacgagagcctggcttcgtggcttgcactgcggagtgcttaggacctgacccacccaatctccacagctcttcacagcctgtgaacgtggtaaaacgcgtgattaggttaagggtcccagcggggagtgcgccggcttgtgggcacttagtacctgagcccacccaacctccaacaactccacaacggcggttcctgagctgggctatagagcgatcagtccctcacccacctcatctccaacacctccacggtaggggctcctgagccaggctgctgagcactcagtacctgatccacccaatatccaacacctccacagtgggggctcccgtgccgggctgcagaggcccacaggaccacacaagggtctctgtgcccaatttctgggcaccctggctggctgacctgtggggtgggggcagctttgctgccatgcacacttgatggaatttcatactgacagctcgcccaccctctcctctcattcctctgggagaaaaaaacttacacgaaagatgtgaacaggcccaagtggaaaggaaagccaccaccccaggaggatgccaaagggcgtgggggcacacgtccacgccgcagcccaagtttaggatttttcacggcaggtgctgctttcatcttctggaactgctaccgtgaagtaccacaaactgggcagcttaaaacaagagaaactgatcccctcatggtcccggaggccagaagccccaaatcaaggtgtgggcagggcatgagtcctcctagggggattctccttgcctctttctgcgtctggtggtggccgtcaatcccagctcccagcactgcaagctgctggcaaaggccaggaagtcagagatggaacctgagctgctgctcagaggagccgggctcagtcacacacacgatgcagacagttcccagatcgactaaggaagcaagtagccagaagcactgtttgcaacaggctgtcattctgctttttagggaagggatatttactcagatacacactgtctctgtaggcagatgagaaaccagccactgcgcggcttctgaggaaggtgcttgtccaggaggcaggaggacagggaggcccgattcccagagctgcatctctacggaaaccgtcctctaccactgggaacattcttaacagaagaaaatacccgcagtggcctgagtggtagcccccaagaaggtaggtccacaccctaatcttcagagcctgtaaatgtggtaaaacacataattaggttaactgtcccaagaaaaggggcttatcctggatcatcagaggggcccctgatgccattacctgtggcatggtctggctctgtgtccccactcaaatctcatgttgaattgtgatcctgagtgttggaggtggagcttggtgggaggtggttggaccatgggggtggcttctaatggcttctaaccatccctgagtgctgtctcatgatagaattctcacgagatctggtggtttgaaagtgcccccacgccccactctctcttcctcctgcaccagccaggtaggacgccctggcttcccctacaccttccgccatgactgtaagtttcctgaggcttccccagccacgcttcctgtacagctcggggaatcatagccaattaaacctcttttctgtataaacttcccagtctcaggtagttctttatagcaatgtgggaactactaatacaacatacatccttttttttttttttttttttttttttttgagacagggtcttgctctgttgcccaggctggaatgcagtggctccatcgtagctcacttgctgcagccgaacacccccgggctcaggcgatcctcctacctcagtctcctgagtagctgggaccacaggtgtgtaacaccacacctggcctgcatgcatccttagaagagagaggcaggggagtttggggacgaacgcacacagaggagaaggtgatgtgaagacagatggggccatgtcacctgtgtgcacagcagtgctccgactcatgctctggcctgcccgtgctgagggacagaacccacagggaaacccatgcctctcccatgagatagaaactggccatctcctctccaaatggagattggacagactgtgttccacggacgggagcgagggcagcagcagctaaaccaggcctgtctccacctcccacacaggcagcagtctccaggtggaagtgtggaagtgtgtgctcctgggtgtgtgtgcagacgtgtgcacacgtgtatggatgtgaccgtcgggtactgggatgaaggggccaagagggatggaggaagaggagggcgctaagaagtgggtctgtcgtgggcctagcttgctgtgctgcttgactggggtgtgaggtacacccctcccctccccaggcatggctggcttcaccgtgcgtgacctgagcagctgcccagggccctgtgatgagaagggacctctgcttggtttaattctccgaagttgccatattgaaatctttaacagttttggaacaagggccccatattttcattttgtgctgggactgcaaattctgtagccagtcctgcccccaggaaactcactggaaaggtgtttacagcatcctttggaggaagggccgcagggcagggtcagccctggaactttggtggcatttaataactgcaaccacatttaaggtgctggcagctgcaggattttacctggttagtgtggcgggggaggctgggagcaggggagcctgggaggcaggcagaggctgggaggcaggggaggctgggagcagaggaggctgggaggcaggggaggctgggaggcagggaggctgggaggcaggggaggcttggaggtggggaggctgggagcatgagaggctgggaggcaggagaggctgggagcaggggaggctgggaggcaggggaggcttggaggcaggggaggctgggaggcaggggaggctgggaggcaggggaggctgggaggcaggggagggtgggaggcaggggaggctgggaggcggggaggcttggaggtggggaggctgggagcaggagaggctgggaggcaggggaggctgggaggcaggagaggctgggaggcaggagaggctgggagcaggagaggctgggaggcaggggaggctgggaggcaggagaggctgggagcaggagaggctgggaggcaggggaggctgggaggcaggggaggctgggaggcaggggagggtggccagatgtagcaagtaaggacacaggatgcccccagttaactttgagtttcagataactagaaatacatttgtagggtaaatatgccccatgcaatacttgggacctagtcactgtttttgaatctggcaccccagctgggcgtgttcggccaggtgggcagggaatcccaggggtttccaggtgggctttgtccgtgggcaccgagtggggggcctttgcctgtagtagaccctgggggccagaccgccgcttctgtgcggagctgcctgtcctcctcccgctgaggttctgaggcaggagtgcagccccaggcaggctcctggtccagaggcatccagggaccacgtcatccctggaattttggttgcatttaataactgtaatgtgcagaggagcgggtcagcgtttcagattagcgcccagcacgtaacgagggcagctgcttctgtccatctggaacttgctctggtctctctcggccaaggctcagcccacaggcctcgcccaccgacgcctgctggtctccatttaatgagcgattttggattaaaatgggagtcaacaacagggcacaatctacattaagtctcggcaaaatgaaaattgcgaagattgacttagggtgttacggggaatatataatcatagctcatccataacatcccacagtgcccgacagataactgagctgcctagagggggattaggaacgcgggcttgtggagacagccccgctgtctgggcctggcctgggaggtggctgggagcaatgcaccaggctccgtttggggtgctgacgtcctgacatcatgacttcccctggtggaagcaccctaaacctggcttgtctattaaaggcctgtccatcaaggcgtgaaagagaaaaaagttgagacgagatctgagtaggaaaacccacccgccatgttccaccttctagagacaaaggacggtaaagcgtgtctctggccgagcctgttccatctcaggagctgctagtctggtcctttctcatttgctggttcgttgcaagatcgcgtgggcctttcgtgactggtttatattctgcagtgtttgtagtcagggctggggacgtctccaggttaatgccaagtgacaggcagcgtagcggcagccctgcgggctgagctcacaggggcctccctggcgtcccctccagaccattgctgctgtttcaatccgtcagtcctgcaagggcctgagcccccagctgccccaggcctttccacaccacgcagccttcccttcgcccgtgcgtgcctggccaactcattccccttgcctgtctccaccctgtcaacccggcgcccggtgtgctgtgctgtggctggaatctggagaagtgtttctggaactgtgggagacagctgggctgcttccgaagggctgccaagcacgcatcgcactgcggattctccgtgtgccgcagaactgcaggcaggatcttgacacaggtccatggatctttccagcaagattaaggccgggccgatcacttcattccccaaacgtctctttcacatccagaggctcacgcagggctcctcctgcaaaaatcaaggcggtatacgactttcagagcttcagtgagggcccctgtggggcagcagaataagaatgacagcaactcccggcctggcccactccaggatttacagaaacacctcctgcagctcctcaaccccccagtgcagccacgttagtgctgacagtctagggcacagggagggaaggaagacagacttgaaggccccagtccggtgactccgtttatgagacattctggaaaaggcagaactcaggacagaacacaggccaggggtcacaggggcacagggcagggaccacagcaggacctgtggggtgatgcagtgttctctgtctcgactgtggtgggggccgtgtggccgtggtgtttcagaagggtgaatgtcaccgtacatacattacacctcaatttacgagacaaacgatcaaatcatagcaaagtcctggacatggagagtgacgctggctgcactacactacatgtccttcatgtcaccgaactatacacttagaaatggttaccacggtgagctccacgtttcctccactgcaggctcttcaggcagagaactggccgcacctgccccttccggctgccgctctctagtgaagggctgtggtgcctgtgtcacccccatgtggcgtggagccgcgtgactcaggtccagctggaggctgctgcgtctgtgggactgcagctgaccctgatgcagtgaccatgcgggcctggagtggggaggcccccccttaatcctcaggacgcagctcaatgacggtcactccccagcagagaaggtggccggatgggcgaggggagcgggggcccagcctgcaggtgcagacctcagctggccacctggcgtggagtttgccaaggacagggacacagtgccgaggtcggagcccgggcggagacctcaccctcagcctgtggggcagtgtgtctggaccacagcagggccctggacacgcccctccctccccagcacaccagcctctgagcgcgtctgttcatttgtaattattttggaaacacctgttcaactacatgatgggggcaaggcgtggggagcgtcctctttccacaacacattttgttgctgcaggctgtacagaggctgcttagtgacactgcatcctggagagtccatctgtcccctgtcccctcctctgtccccacagctgcaatcccacacaatatcaattagccacagcatcaccaccacctgtgcgggagacgggtccctcactgataaccagcaggtctgggggagccatgtctcctcaaagttaccttttaagcctcattaagcagaaagtcagagctgacttgctacacccatgctcactgaaaggtgctgaccgttggccgggcgcagtggctctcgcccaccttctggaacagccatgaggcaggggtgaccccaccctgggtgaggctcaggagtttctcctgggctgacacccattttctccgagccacagccacgaaggctcaggcgtttctcctgggctgacacccattttctccgagccacagccacgagatgctctttggtctcgggccacatctctacactgcgtcttggggcgatgctcacagtgggcacagctgtggtctcaggggctgatagtaaagttttattttcttttactttatttttaatttttttttgagatgaagtcttgctttgtcacccaggctggagtgcagtggcacgatctcggcttaccgcaaccaccgcctccctggttcaagcgactctcctgcctcagcctccagagtagctgggatatgggtgcacactatgcccggctaatttttttcttgtatttttagtagagactaggtttcgccatgttggccaggctggtctcgaattcctgacctcaggtgatctgcctgccttggcctcccaaagtgctgggattacaggtgtgagccactgcgcccagcctgacagtcaagttttaaatctgagctttggtgctttggaaagagtaaccttctcccccagcctcggtttctccttctgaaaaaatggtcaatggtcaatggaatcccacaggcctgttgtctcaagtccacagcctccatttcaaaaggctctgaaaatggaaatgttaaaaaaaacactcatttgatagcaaagcctgccctggagggacctgaggccgggtgtggtcttcgccttgcatgcctgcggtgggagtcctcgatttcaggaggaaacagccgcagcccctaactctggcccctccctgccctggccctgttgtgactcagtctcactccagtttccctccctggggggagaaagcctgaagggaaccatggccgaaggacccccacactgaggacaggccgtcatcctccctggcgctcccttctccttgccctcctgtgtctgggttcagggaggctacacgtgcctctggctgtgacgtctgcgagtggggtgtgccctggatgccatgcagccttcctgctgggcaatgaggaagcgctggcctgcccccggctttccctccctctctatgctcacccctccgacgcgcacaggagaagcacggggaagccgggtgcactcagagttggggacagcccgggaacctcccacgctccaactctctcttctccttccagaaagggttacagggcctgacctctgggacacccaactcatcgtgtttgccagggctttccagggtttaagaaagacagaaagggctgtgtcctgggaattggaatggtggctcacgtctcacctcggtgaaacacacaaggcaaactcgacagaaagggaaggagggccccagagatctctcagggctggaggtggagggacgtgggggcagcagggctgtcctggcaggtcagagttgtgctgtaacaggacgaaggcgagggggctggaaacccacacagaaagagagctgtatgcagcatcgcaccacaaacatgctcatatatgcatacacatgcacgcaccccacatgcatgcatacacaccacacatatgcatacaaatgcacacccccgtgtatgcacacacatgccaaacacatgcgcacatcccccacatgcatgcacacacaccccacatatgcacacaccccacatgcatgtacaccccccacatatgcacacatatgcacacaccacacatatgcaccccccatgcatgcacacacaccacacatatccacacacatgcacaccccccacacacatacacacaaaccacacaaatgcacacacacgcacacacaccacatatggacacatgcacacacacatcatatatgcacgtgtccacacaggcacaccacatggacacacacatatagcacacacaaacacaagtttgggtaacacacttgggcagagataatttttgcccccatctgatgtctgcctgtctcaagactagggtgacgacaggcgctcagttgccccaccagggccagtctttcctttccagacccgccaggccttccccaagccggacgaaaccagcacctacctgggctgggggaggtgaccaggggcttgagacctgctatacatttgggatatttttaaaagcatgggttgatggttaggggagcagagctacccagacaagagggggtgcactgcagaagcaccccatcttctgcagagagccttgaaggaggaggaggagtggggaggggaaggggagagggaagaggggagggcgagcctagtgcttttccttctgttagtgccctggaagctgctaaggtagaaggcaggagagcagacggctttggatgcatctgctcattctggacacaccgctgatgctaccaccctgagggcggatccagggtaaaagcaggggagtgctcgtctcttcccggcagcaggtgaagacgcttattttggaaacccagattcctgaatgtgaaatcaacatcttcccgtttgtctatggtgcttggaatgaaagcgagggcttcaccgacttctcagctcagggccgtggggactctctccagcaggtgtcactgacttctcggctcagggccgtggggacactctccggcaggtgggatggttctgctcaggggcttggttggtgtggggtctggaggagaataagcttctcccctccgtttcttccaccagcagcatgggcctgttggcattcactggttcatagtcggtgggtttctgaatcccagtccctaaagctgtgggtgtgttcatgtactgaacacccttgtgacgagtctctcaccggtttgcattacgtggacccaccgggacgcaatgccccaggagtctgctgggctgtggaggatggttttatttccgtgcatgaaatgcagagacggtttgaccctgtaactttggtaactttggtgtcatccgtggtcggaaagcaggaagtgctgggggccagaagcagctccagacgccgagagcacacagaggctgtggatgacggcgacaaaaatgcatcctgtcagatgccttgtggccatcagacagcatcgtgggtcctgtctgtgtctcggggtttgcggccacagatctggactggtggaggcctcattaggacagcaagggccgtccacgtgcacggggagattggccccccgtcagggccaatcaggggttcccgggacagcaactgactgtgggctcattacttttaacaaaacccagcttggaggcaaaacgaggctggctaggaagaggtgcagacattttctgaggagcactttagccaagatcatggtcctgtccccaggggccccgggtggggcaggcatgcatggtggcgctgtgtgtctcgggcaacagagaccattggcaggctcgtgcgcactctgcgctgtttccgaccaccatggcccccagaaacgcacagccacagaggccgcttgcctgcaagggtggctctcggaggatgcccacagatgcctgggcaaagacacaccagggaaggacagagacaggagaggccacggcggtgtgcggtgtgctcagagacccccttccatgcatgcccctcagaggggctcctcctcttacgttaacttcaaggataattctgaccgtctttccattcagctactacacaacagcttttatacatttatgtgagtaaagatgcctcaggcacgtcagactggaaataatacagcataaatcactttttacagcaaataaaacagttgaatcaaaggtgactttgctaactgtttgaaccttttctgcgttcggggtagcacaggttttgtccctttgggattaaatttgcaaatgcatatcaacttcctaattttatgaaacagactttggttggagtattggaacacagtatccagggttatgagttcaaagaggtaattgttggagaaataatttaatacatcacaaatcctctatttctatctcttcaaatgggatgccaaaagcgattaaagactaaaaacataccacaaacaaattcacattagaaaattgctgtaatcattctctgctggattaaccagggtttaggagcctctggtggctggttccatcaggaagtcttttggagagcgatggtgaaaccagagtggcttgggggttggagacggtttgtgcatttcacccatcctcttaggagaacggtgtttgtcctttacgaagaggtgcctcttcttctcctgttcccatcctgcaagggaaacagacacgcgcatttggtaaagtaagcgtctgtaaagcaagcggctgggcattgacttaaccataaggtaaaacaaagttccccaatgagtctagtgacagctgcgcacatgaaaacaaatcccattgttgggatgaaattatcagctaaaaggagctgctggaagccagcgtgcctggtcaaccagggtctgcccatgaactgctgtgggccggatggacccagtggcaccagacaggccctagggtggaggtgaagctggggcagttttgccctgacataggaggccgagcgcctgttactgaaaaccggggatgcagttgtaggtgagtgaatttcttaactgggggaagcaaagctctttgtaacatataccaggcaccagcggaaccaaaagtgctcgggccacagtgcctcacccaggggtgggaaagtccttggcagcttggtttcaggcaggaaagtgcgtgttaagggctgccttgtctgaggtacgctgaccacagggcatccaaacgcgtggagatgcaggagaagtgtctgtctctttaagaaatgaaaggccaggcacggtggctcacgcctataatcccagcactttgggaggccgaggtgggtggatcatgaggtcaggggttcgagaccagcctgaccaacatggtgaaaccccgtctctactaaaaatacaaaaaaattagctgggcgtggtggcgggcgcctgtaatctcagctactcaggatgctgaggcaggagaattgcttgaacctgggaggtggaggttgcagtgagccgagatcgcgccactgcactccagcctgggcgatagagcaagactctgtctcaaaaaaaaaaaaaaaagaaaagaaaaaagaaaaaaggagaggccttgtgaaccccacatttgttttctaacctgctgggccctctatttttacccagcaagctggagagtccctggggagcaaggaagcaggcatggccatcagtgcatgaagacaagagtgggacctaggtcaggcaacctgcatctcctgaccgcacgagggacccttacagagccactgggctcggagaagcctgccccaagctcccacaaactaagcttcacaaaactcgtttccaaagagaggccaagccatcaagagaatgggtcttggccagacgtggtggttcacgcctgtaatcccagcactttgggaggctgaggcaagtggatcactcaggagttcaagaccagcctgggcaacataggaaaacaccgtctctacgaaaaacaaattagctgagcgtggtggcgctcgtctataatctcagttactcaggaggctgaggcagaagaacagcttgaacccaggaggcagaagttgcagcgagcagatatcgcaccactgcacttcagcctgggcaacggagtgagactccgtctcaaaaaaaaaaaaaaaaagaacaggtcttgatctgtgagtcgctcaagcagcagccagcagggcccacacctttactctgtggccttgtaatccgctttctcccgtttcctaggcttgggtgtggttggcgcgtgtgaggctggaggggcatgtggacccagtgactcagtgggcacagcctctgcctttcctgctgccggcccaggccccagccacagccccagccccagcccgcactccggagaaaggctcgatgaatcaggattggaaaagaaacaaggatgggacatttcctatttgcccagctctagaatggactccttaagtccataggcatttcctggttattattaaacaaagagaaagaagcaaggagtactttgcgtgcttggtgttttcacggccgagagctgcaaaacccgaggctgccaaaccacgcgtggccactgagcactgaaacgcattggaacatggctggtatgaactgagctgggctttaaacacatgctggaacttgaagacttagtgccaggaaagtaaaatatcgaataactttaaatatggatgacacactgaaatgatattttggatgtattgggataagtattaagttatcaataaaaataatttcatctgcttctatttccttttttaatatggccacttgaaaatgtaaaattctacacatgaccacgttctctccctacagcaacactggtcacggggtggtgtgaacacctcggttctggggacgctgcctcccacctcccacagcctgcacatctctacctagaaggaatctaaaggtgagcatcttagccagacgtggtggctcagcctataatcccagcacttgggaggccgaggcaggcagatcacttgaggttaggagttcaagaccagcctggccaacatgatgaagccccatctctacaaaaaaatacaaaaattagccaggcgtggtggcgcacatctgtagtcccacctactagggaggctgaggcagaagaatcgcttaaatccggaaggcagaggctgcagtgagccaagccaagatggtgccactgcactccagcctccgtgatggagcgagactctgtcttaaaaaacaaaacaaaacaaaacaacacagtgagcgtcttgaaaagctcagctggaagcaaagctctttcgtgtttggttcctccctgagtgttgggggaagggtggctcctggtgggtggtgacggtgaagttctttcccggtgatccccagccattctcaacacacctgcaggagcacagccgtcagagaaaagacgagcagccccccacgtttctcgggagccacgggcttgcacaggcacccacgtgggttctgctttgctgtttgccagatgtgggcacacaggccgtggagggctgtcttggaatgagaagatccttgggcaaatctgagaaaggccagatgacactgtgattgcccaggtggcttcgcgagcagccactgcagagaaggcgagctaattctccgaaacactccactccactcaggccaagtgagaagcatgcagacgtttgtagaacagtagacacacagctttgtcatgtacaaaaaagtttaaatgtaacttgaatttttatttaaattaagtaatcggaagaatttttgattagtgaagtggttttttcaaaaacttattctccacccaaagagagaaagagagatttttttcctctgcccttttccttatgatttcacacatgtgctataataagtggttgcttttagatgagttttagcatctcagagactcttcagactctggtttcgagtggacacaagtatctgaaaattgaaattattgtgaattcagctacaaatgaacactatttcacttgatattaaaatttaaccatattatttttataaaataaatggcaataaaatgctttattctgaatataaatgatgtaccaatgtctctgattttaaccagaataaacacccctgtttcaaattctgataagcaggtaatttatttaagatcacgttgaaatgaccctagaagtgaagggcatttgagtttccagctttcccactttatctaaaaggggaaaaacggtgtctggcactcagcttttcgaatgtgcaaaactgataaactagtctgttaggggaaaaaaaaaagacaatgaagaaataaaagtggaaattagcagaaaccagtattaggcatatgtctttatgaataagacttaaccatacacttgattttgcaagtacagaaggccctgtggaatgtattaatcagagttaaacgctgtagacaggcgcgttgcagggcggcggccctctccccttggcattaccgacagccgaggaaattgggttaataaagccggatactgcggcggggccgcggggcgcaaaccggcgcggacagatgggtccccgggggcaccctgcccggctccctggatcccggatggtggcagagctgggagctgcgcaggacgggcactgcgcagcgcatctccgttcacacccggcggggcacggggcccgcagcagcttactcacccgtagcccggcctcctccctcggaagggagaggggatcggtggggagggggtttgctggacaccagggctagacggggccctcccctgaccgtcagggttaagtagggcgcgggctgtgaggaccctcctccacgcagccccccgaggcagagggcccgcaaagcggtctccatccaactccaccccgcggacgtcccaggcagcggatggcggcgggggggggaggccaggggacatttaggggacaaattcctcagacttcgaggcagccggcgacggcgtccaattcccaaataaatagaacaaactcctacttggaaaaggccttccccggggtcttcctgcgcccgcggtccagctcctctgcagacggccatcgtgggctctccgcagggctgcggagtctcggagtcaccgaggtgggaggtgccggccacgcgcgtcctcaggaacagagcactgccctgcagtttagcacgaagggccggctggagcgggagcgcgaggcccactgcaagaggatcaggagccagtaagtccggcttttcttcgtctccacctttcgtgcgcccggggccaggaccgcctgtccggaatctgaccagtgcccgtcctcgccgtggccctgggaccccgcggtggtcttcttttggggacgaacggcagtgcccgaaggatgctctacccacccccgttcctagacttgctgggtcccgacaatacccagtgggtgccgcgagttcccgggcgcagagtccagcgtccggctctcgagctcaatcccgcgccccgacggccttggcgcttcccgctgcgctaaactgtccaccgcgcacaggctggaagcgaagtcgggccccctcctcctggtctgcagggtccctccaggcctttcctgtccgggcagagagacagtcacaggggcgatcggaggacgcgtgcgggagggccgggggcccgcgcggtcacggcttctcgtgacagtgtttgcaaagcgcggagggcgtcccggagaaggcggcgcacttgtcagggcagggccccagggcggcgcctgcggagaaggggcacacagtggcctggccgaagggcgtcaagggcgcggcgtttacgggcgcggccaggccctggccctggttgaggaaggccaccaggcgccgcatctcgtccagggcctgcgcctgcatgaggatatagttcttggcgagcagcagcgtggcgatcttggagagcttgcgcaccgacgggctgtgcgcgtaggggatgacggctcgcagcccgtccagcgcgtcgtttaggtcgtgcatgcgccgccgctcgcgcgcgttgatgctgagccgcagagaccgctgctctcgcggccgccgccgcccgtccgccgcgctccctggcccgcgccgccgccgccgctgctcgaaggcgtcgtcctcgtccccgctctgttcgccgctgctctccgccgcctgagctggggcgcgaggtgcaggcgccgcggggaggtcgccgcccgggcccggagtgccgtagccgcgggccgcttcgggttctcgcgccgccccgtaggcgagacccgcagccgccgccgcgtagccgtggcttagtgccaggtacgcgtcccccgacagcgacttgagctcggccatggccgcgccgcctgggctcgggggctcgccgggtgggcggatgctcatgtgggtgagcagcccccgaggccggcccgagcccgccgctgccgctgccgctgcgatgaggctcccggctctgcgcgtcggtctggcttgcctgcgggtcccagagcctcggcgcccgctgcctcctccgcctcttccttctctcccacctcctctccctcccagccgcgacgcgcagggggcgggctctacctccccctcgcccccgcttcggttttaagccgcggaggcgcccggtgggacctcgctgctgtccaatcaggggggaccgggtgagctcctcttcctggagccgggctccaccagcgccgcaggctcacaggccgggggtgggggctctggaccgaggggcggcgcggggcggcgcggggcggcgcgcgcggtcctggagcgctagtacttgcttctcgactccccggccgccgcctccggccgccccggggattccgccaccaaacgcacgcgtcccaggtgggcacccgcctcggtccgtctttgagtctgaccctagcgcaagagtccctggcgacacgcaggggccagagcgggggggcgcgccgcaatagcagcagcgccagcgccaacaccctgtcccgctgaggggccgcttcgggtcggggtcagggtcgtgggcgctctggtgcagccgcggcgcagcgtgtacccggagcccgcacactccctgctcggggcgccctgtggccaggcttgaggggcagagtgagagggagtttctagaacctgttgaaaaacgccacgagcgttgcaggccggggagggcgggaaggtggagggcagcgcggcctggggctccccgggggtgggaggggagctctgtgagctgcaggaccgcctcttccctgccagccgcttcctgggcatctatcagcgaaacgcgtgaggcttggtgggctttcccggagcctccgaacccctggggtccagccacactggatgggaatgtggccagcctcggactcgccttttcagtcctcttccaaccccgcatgaaggccagaaccccagcccttctcccaggtgggaacctgcctggaggcccggccgagtgctgaggctagagtgtgctgagggatagtggcttctccggtcctggcttgggtgggagactgggccaccctggcctatggcacgaggtggagcggcccgtcgggcccttctgtgtgacctgggaagggccgcataccctccctgttctccaggctccgccccaggaggagccacagcgatggggcagtgtgcgcagccccgggaggggagtgggagctgcacgtgtgtggggcggatgtgctgtctggaaggttctgggaacgcagcagtgaccggcctgtccggtggttccctgccaggtgcggggtgtgaggagacagatgcatggataagtctccgtgggaaactcaggcctttgtcctggcggaggggaatgggtctgaggcagcctctgccgggctggcggcctgtctggctgcgcgtcctgcagcaccggcctcacccccagcacacgcccgccaggagcgcaggggccccgaggatggaagcgtctgtctgaggcgctgtcctgggaccccaccccgccttcggggctgatgcacagaccgggaattgaggatacctggtgtggaggaggccgctgtgtttgggcctgggtctgaagggtgagtgggtgtcattgtggccacgggccggggtcgggggagcattcaggtggccggaggaggcctggcacagggaagggcagtgaggggcccgggtggggccaggagatagaggggcgggaccaggcctgtgggacagtttgaatcacgcggggagtttggtctttatgggaagaaaggcgccgtggccattcggagagccactctggcactgctgccggtgcggtccggggctgcggggcctcctcctgggcctgaactgcagggctggtgggggccatgggggaaggtggctccacaggtccccggagctgggggagcaggaggatggggttgaccaggagggaaagctatggagctggagaatgcaggaggcccccgaggggaggtgcagccagcgctggtggggaggcctctgaggggtacgcggtaattgacatcacgggtgtgggtgagagtggctttcaaagcatcggctggagcagggtccccattaaagccagagacgctgacgccatggggctggggttggggctgggccggggctttgggaggtccgaactccccagcagggagccagggctctgggccagttcccaggcccagttaatcttcagtagaatcgatcgaccttggctcagagggttggaggcagggatgggcagggggtgaggggtgaggcgcacgaaacagcacccgggtgaggcccctgctgcggcccctgcgggaccagccacgaattccgggcttcagccccgccagcttcagaggcggcgttttcggtgcgacgctgccacctgctggctgtctgggagttgcacccagaggctcagaacccgtgtttctcagagggcccgggaggggcgaaactgcgggttcccaggccctcccggattctgcgcaggtggacgctgggggctgtttcacaggcgcccacatgataggggagctggaggaacctgccgtctccgccatcgagcgcccctccgagctggggttggacgctgccagtttgcacagcagcaggtgagcctggggggttgagggctgagcgggggtcccagccgatgaagcagccccgcaccttggccagcttctcgaacctcctctgggcagaggctgtggaggctgcgaagcggcggaggcgttgaccaggccagctgctcagcctttctggcctcagtttccacagctgtaaagtggggtctgtccacaacacgtgtggtctagcgacggccctgcggagtgggtctgtaactgcggactcacttgtcccgggctgttctgaaccggtggttcccccgccctcccaggagacagcacctgtggccggcagccgcccctgcagcggcccctggctcccaccgcgccctggccctgggggtgcccaaagaccggggtgtgctgtggcccgagtgagcaccctgtgggcgtcactgctgtccatgctgctgggattggggaagggaggtctggtggggcacagtgggcgcaccaggaggtcaggctgggtggggggagcgggagggagcccccgctgggtggtcttgggccagccagcttcttgcctgcagggcaatggtgctagtaactggaacaacccaccctgcctctcccagagacggcgcctcctcagtgctccccttccacaggacgtagggtcttctagagatcaaaacagggaggaggaaagaaatcctaccgcaggcccctgccccgaccctgggacccacactgtttggcttctagggacaacgcccaggccctgggatttgaagactccaccttttctttcgtgtgtatatgtgctctgtcaaaatgtgtatcacatgaagttgatcgttgtgaccattttcaggtgcacagcccaggggcattgtacacaaccgcggtgttgtgcagccgacgcccccatccaactccagaatgtttgtatcttcccaaactgaaactctgtccccagtaaccccggctcccctcctcccccacccgctggaaaccacgactccgccgcccacctctgcatttgactgctccaagtacctcaggaaatgacctcatgcggtctccgcacgttcgcgtccatcttgtttatttccagcgtttggcccgtgggagcgatgagcgcacctgttcagcccctgctttcagttctttcagggagttctcacgtggtcttcagaggttcccacacgctgcttcccacagcagctgcaccattgtacattccaacagcaacggacaagggctccaatctcttcgtattcttgcaaacatttactattttatgtggtttttttttcttttctttttttttttttttttttgagacggagtctcgctctgtcgcccaggctggagtgcagtggtgcgatctcggctcactgcaagctccacctcccgggttcccgccattctcctgcctcagccgcccgagtagctgggactacaggcgcccgctaccacgcccggctaattttttgtatttttattagagacggggtttcaccgtattagccaggatggtctcgatctcctgacctcgtgatccacccgcctcggcctcccaaagtgctgggattacaggcgtgcgctactgcccggtttgaaaaggcaattgaggtttctaaactcctactaaaggaaataattcctagagttgggctgcctaagagcttacagagcgataatggctcacctttcacagcgacagttacccgaaacacatcttcagccctaggaattcagtgccgccttgactcggcacggaggccacagtctttggggaaagtagaaagagctaatcaaactctaaaaaggactcttgctaaactatgccaagagacatcagaaacctggaggtctttattacctgtagccttattacgggttcgaatggcccctaagggaaatctgcatctcagcacttttgaaataatgtatagaaggcctttcttaactacagacctcctaatagacatagatactttcaagctacagaattatgtgatcaacttaggacaagtgcaaaacgcactccttgactatggaaatcagagactcccttcccccactgaggaagacaatctggttccaacccagctgggagactgggtcctattgcaaacttggaaggaaggatcctcagcagatcaactttccccccaagtggaggggactctatcaagttctccttagtaccccaactacagttaaacttctgggaataaacagctgggtccacttatctcaaattaaacctgtctcttataaagccccacaggccaacggaacacaagagactgatcccgtttattcccgtgagccagtcagtgacctctgattcctgttcctaagaaatgagagggatggggggcataaatacctggattggcattctacttttaggcacaagttggaatcatgcagagagtgatttatttactgagtaggcacagactttagcctgtctacataatcacataaacggttgggtatgtggagaattgccactttcctccacctctgggttgccctggcatagtcaactggccagcctaagtctgtggggattttacgttccagaccattacccaggctatgagagctttagagctcacgtctctgccattgatgagctgtcagtcagtcctctattggcttggttccaacagctgcccagttcttggaaagcctttctgtttagctagtttacttggaatgattttatttattttgctttgctattgtagaatatattgcggttgtactctttgtgtaggaatgcatgacaagctcactcaacactttcttcagttggacatttttttgttttttttttgtttttttttgagacggagtctttctctgtagcccaggctggagtgcagtggcatgatcttggctcactgcaacctccaccttctgggttcaagtgattctcctgcctcagcctcttgagtagctgggattacaggcgcacaccaccatgcctagctaattttgtatttttagtagagacggggtttctccatgttggtcaggctggtcttgaactcctgacctcagatgatccacccgcctcagccttccaaagtgctgggattacaggtgtgaaccaccatgcccatcctgtttttccttcttaaatgagacaagagggatagagaatggggctgtgtgtttcccttcccaacataaaagactggagggagctggagttgatacttcccttcctccaggttggttagactctgattaaactctggtacgttaaaaatagtttctcttgagggcagaggaagaacagaatgctctggcatatttcgaaagtgctacttctcccctccccttgtccaaagcacaaggggatttttctctggtatttacctgggggatctggtagagtttgtgcaggtaaaactcacagaagtgtggcctccaccctaagactgggccctggagtttttaactgtcaagcttggccacacagcctccagcaatctgccagtgacagtttaggttttcccaacctggcagtggttcccagggaggtgtctgctctgcagaattgggattctctgcatctgtctgtcgtctctacaacttttttgggcagtggtttgccctgtgacctcatcatctgttgaatataagaaatattattgactttcagtttgctcacgttttgttcttgtgaaaagattgattgtttccaagcttctcacacagtggactagaaattgattcatttcatttatcctttttgggtttgtggggttcttgaatttgtgacttgatgattttgattacttttagaaatttcctggctattaactctggagtattgcttcaacctcatgttctctcatctcctctctgggatccagttacaaatatattggtccttcttcctgaatcctttgtgtatcttaacctgtcacctgtattttccatttgtattatccatacttcattctgaatattttctactgacctattttccacttcactaattctctcttcagctgaatttgctattaaagccactaagtttataatttaagtgattttatttttcagtgctagaattttcatttggtttttctaggtttttttttttttttttgctgaaattctaaattccacctctatttctgcaaatgctgtaagcacagttttgttccagtctctgtctcgcgactccagtgtctggactggtagatcttctgcctatggtctctgctgctttcattcttgctgatttgttttttcaattgtctagaatttttattgtggactgaacattgtatttgtaaaattattttgtagaaatcatttgaggtctattttattttcctccagagagggtttatgtttgcatctgcgagacatgggggcactaggggtcctggatcatcttactctagtttcagggattgaaatcatttcaagatgattacagtttaggttttcctaccctggcagtggtgcaaaaggccctgagttgctgcaagagccggtctccttctatccacccctatgtctagggtgcggttatttgttgtcccaactcaaaatggtgggggtcggggggatgttcgccaactccccactctcaggtgggctgaatctctcgctgtctggctcctcagtgggctgtgagctatctgaagcagcaaatgctttgggggaaaagtgagcgtcccgaaggcttttttcactctggatctttgtctttctgggattttgtttgtttgcattccaagcaaatatttttaacattttgctcagcttttgtagtcaccatcagaaaagtgatgggtccagattaactagtccctaataaccagaaactggaagtctgatggttgttttcagtcttgaacaacattgattctgcggtgaccagtttagagttcatgcaatagaccttcctcccccttgtaaaatcatcactatttcagctaatacttagagtgacctcctggtgactcatcctcagccccctttgccggttcttcttttccccgacattttcattctggagggcttgggattcagtcctttggcctttttcctagctgtgtctgccccctcggggatctcatccaatacccttcccacagcctacccagaccccagtgctgaactccagactcacggattcagcggagcgcagaatgtcagatgtgtgagggccgcctccgatgcagcgcgttccagatggagctgcggcctcccccagacccgcccacccccacccccagattctgttgagggcaaatcatgcttcctcgcagctcacaccctgttggttctccctcccacgttcatctggaatgcggccgctccccacctcttcccgcctgccctcagtcagcacagcagccttctaatggcttctgccctcccatcatccccagaccctccctttcacacagcagctgtgaggtcctcctcaggcagggtcaggtcacgcctctccctctcagagtcctgcctcagcccctcccctgtcatcaacaaagactagactgtgaatggccccatctgcctcctgcctcccgagctcacagcctctgaggtcccggatgggaaatcccaccaggcagtctgtggacgccgcactgcaggcgagtggggtctatcttttcaaagctgatgcccacgcccagagagggtgtcttccatgagagacgtggcctggcagctgctgctgtgggccctgggcccggggacacacccggccctcattgaagacaggaggcatcccgctgggggagtcagatgagatgtccagccccacgtcacctccctgtgctcggccgtgctccgtgaatggcctggtgggtttctgtgtgtggagagctgggtgggcttctagggtcttgactacggggctggatgtagagtactctagagaggctggggatgagatgaggcagctgcaggtggcccctcctcaccgcctgaggacgcgggaccacgccaggcttttctgggcagggtgcccctggctgtgtggcaacagatatgcacagaaatgccacatgggctcctgaggcagcctcatgtctccactggtgggtggtgtgggagaggggacctgagattttgcctggctccttgctatttgggggacgggtgtgcctctggggtcccagctgtgaaccaggttgtttcacctggggtggggtcgggcttggctctgtccccgggtcctgggctttcctgggctcccactcactgccctctgggcagctgggcctccccacatccctggcgcgctggggcagccccatcttccttcctgctgctcaagcgagagcctcgccaccactctgagtgccttcgctcacgctcatccagtgcatttgaaatccccgtgctccaccttcccgacacccagagtcagccccatcacaggtctcatctgcacagggctccctgcctttccctgtctccacctcccccacccctgcccagtcagccgcatcacaggtcccatctgcacagggctccctgcctctccctgcctctccctgcctctccctgcctctccctgcctctccctgcctctccctgcctccacctccccccgccccgcccaggcctgcagctcctctcacccggtgctccacccctgcatctgggctgctggggcccccgtggccatgacagatgccgcagaggcgtcacatcctttctgggtgtgatggcctcggcttctgctcgctcactgcccggcatctccagtccagcttctcctgcagcatggagagaggccacgtggagggtgtgcccagcccatggcccacccaaggtcccctgtgtattggtgaccctgcttggaccttgcaacccagcccagccccacgggatgcagccacgaggtcaacccagccacacctcatgaagcggacacggccaccccgacccttctctagtcctgcacccagagttgtgactgtaaagtgggggttgttttaagccaccaagctctggggtagtttgctccaggcagcaggtgactgagacactgccctgtgggactccccatttctgcactcgctcccctgtatgggggctcctggatcatgccagggtcacgtctgataaacccaatgttagttgaaagcctccagatgaaaggcactcagtgcactccgcctcctgaatatcattgttcggcctcccggccttcaccatgtgcagacgctgacgtcagcacattcgacaaagtccccaattcccttgctctgtttctaaggccccgccacccccacgctgtggctgcgcttccttgtcctcatccttgtccacctgtgttctttccaggtgccctgagtggactggaggggcacagggcagcctggcacctgctgagcccttgctggggccatgctgtcctgagcccctgctgagcaccttatggggacatgagtgggggctcagtctgggaaggaggaggggaggcctggggagatggtctgactagctctgcccagcccctcggtgctgtctggggacaggctggggtccagggcctccccagatgatgggaccagtgtctccagggctctgcaggctggtcggggcggctgacctgggcatttcttcttctggctgccgggaggcagcaaggccccaggtttgcatctcagtggccaagtctgggcgaggcttttcggggagcaggggtgcagcggccaagtgtgtctttggccactctggggccacatcaacgggtcctggggtccctgaagcacccgggaggcagccaggagggcgccagtgctgggctgtgcagggtgggcctgaagaagggggtggtgcctggcggtgatggagtgggcccgtcccatcccccaggccggcagccctgcctcaggagagccctcagtgggctgcagaggggcctcccacggtgagagaggacggggagggactggagtgtggttcatgtggtggcctgctggtgcagggctgggctccatgttggcagggcttgcgggggcggtgctgggcttcacagtggcaggacttgcagagggggcctgggctccatggtggcagggctggtgcagggctgggctccacagtggcagggctggggggtctgtgcccacaaggccacatcaggcacaggggaccagcccccaggacagaggtcaaggcctggattttgtggcccaacctggacccctaactctctccttgccccacagtgagtaaaccgaggtgcagtcatggcgcctgcctcctgccgtgtgtttaggtgaatgaggtcaggccgggtactcacctgtgcatccccgctgctgggaccacagcaggtgcacccacggaccccagccccactccgaccgcctgtgtcctcaccctctgcgggctgaccctttccccctctggccagtggaggtgggaaggctctgagggcccctgagcccaggttccctctctgtggcccttagccctggccacagcactcggaacttctaaccgagccctgccgccatagcacacggtccgtggtgcagtcacctgacactgcaccagggcgtgatgtccacaggcaggccatgccccggctccacacagcggccccggactggagtgccccccgcagagacagcgggcaggaggccgtccttcggggccaccactgtgaccatgagatgcccagccctagagggtcaagggtccgtctgagctgcccgagaggtcctctgggctgagcagggagtgcacaggtggtggccgacgcctgctgctgagagcgcagctctgcggtgttgatgtggaagcagctgagccctggggcatgggctccaccagggccctcacggcctgcgagactcagggctggggactgggtgctgccatgtggtggccctgctgtcagctgcagtccccagctctgacctgcagagtctcactgtctcctttcggcgtttgcggagttggtgcgtgtgccctggccgtgctcggcaagggttcctcccggataaggtggaacccgatttggggtgcgctggtatcactgtcgcaatgatgcagtgtcgtcccgtctgggaacaaggcatcttgccatttatttaggtcttgaatttttctcttcaatgccttgtggtttcagaatgcggcttttccacagagtttgtgagattttcctatttgtcccacctgttcttgctgcctcttctcttgtatcgtttgggactaacggacctttcacatgactctgtgcttactgtcactacccgcttgtttgatactcccttccttccttccttcctttctttcttttactttctttgtctctttgtttctttttcttttcacagtcttgctctgtcactcaggctggagtgcagtggtgcaatctcggctcactgcaacctctgccttctgggttaaagcaattctcctgcctcagcctcccgagtagctgggattacaggcatgagccaccatgcccggctaatttttgtatttttagtagagacggcgttttgccatgttggccaggctggtctcaaactcccgacctcaggtgatctgcccgcctcggcctcccaaagtgctgggtttacaggtgtgagccaccgcacctggccctttggcttacgtcttagtggccaccctcttcagtaggtaggcttctggtacgtgcttccagatcaccaaggcgtagctctaaagagcaccatgagttcataacagcataagatccgctcgccgcccacccgctcgccacccacccgctcgccactcacccgcccgcccacccgcctgcttgccctttgtactatcgttgtcagacgttttactaaatccacatatgttataaaccccacagtgtattatgaatacgtttgctttaacaggcgattatctttcaaaatttgaaaagtaataaaaacagcatttttttttttaaagagacagctctcaccgtgttgcccagcctaaactgaactcctgggctcaagtgatcctcccacctcggcctcccaaagtgctgggattacaggcgtgagcaaacacgcccagccagaaaaacagcatttttatcatccacatattttccctatctagccactttctttgtctgtgtagactcatctggtgtcattttccttctgcctgaataactttgatgtttcttgtaccgcacgtctgctggtgataaattctctcggccttttgttgaaaaaaatctttatttgcctacatttgtgaggatatttttcccgatgtagagttttagcttgacaggtattctcttctttcagtcctttaaatgtgctaacgcgtcgtctgtctcccagctcacgacgtttcacacgatgtcggctgtaattcctgtctctctatgtaacatgcctgttttctttgactgcttttaagatttttctgtgtcactggttttctacagttttattacaatggccgtgccgtggtttctttctgtttattctgcttggagttcatggagcttgtctagatttttgtccaattgaaaaactttattaaacattttttcttgatccctccaccacattagctgtgtgcagcatattgtggatttttttttttttttttgagatggagttttgctctgtctcccaagctgggatgcagtggtgcgatctcagctcactgcagccttcacctcccgggttcagtgattctcctgcctcagcctcttgagtagctggggctacaggcactgccactaggcctggctaatttttttgtagttttggtagagatggggttttgccatgttggccagcctgatctcgaactcctgacctcaattgatctgcccgccttggcctccccagatgctgggattacgggcatgaggcagcacgcccagccattggtcttccagtcttttttccctcactgggcttcattttgaatatttgctattgctatgtcttcacattccttaaaaaatgtcattggatgttattcctgtccatcgtgtttcatttccgatgtatttttcgcctctgaaattgcgtttaggttcctaaagatctgtcattgcactcttcagcacgcttatgttttcctctgtgtccttgaaaatgtgggccctagttgtgactgcggctttaatgtccttgtctgctgatgccatcgccgccgtcctttctgggtctgtttctgttgattcttttttctcctgatcctgggtcatacttccccctttgttgcatccttggtaatttttggctgcacgcttccttgtgagtgctacattgttaggtgccaggttttgttgtaaccctttagagagtgttgggcttagtcctggtatgtggtgaagctgctgggaacccgatgaccctttccaggctggccttgggtgctggcaggccggatgcaggttatctcagcgccgtagcagttccctttggagggctctcccggtgacgctccctccctgtggggatgcagcttattcctggcctgtgtgagttccaggtgctgtccctgttccattccccagggctttctcccatcttgcagtctcatcccaggcacgtgcaagttggtacctttctaaggctttcggggagccctctgtggacctcggtgctccctctctgtgcagccctctgtctctggtcttctgccccgtggctatgccttctgtctcctcagctcagagagatgtctgggttctgtttgcagccccttctgagtcgcagcatgggagctgtcttcaggtggtgagccgggcaagtgtgggtgcccctcacttgctctctcaggggtcatggtcctgcactccagaccccgagtctgaaggctgctgtccacgtgtgttgtcggtttctagttgtttataggggaggggccctttcctagacgggcaccggagtctggctgcttctgtccctgttctctccactggccggggaccatgagaggctctggtggggccggtgatgtttattgagtggtgacgtttattgagcagtggaggggaccggctctgtaaagcctcagctctgtgcaagcactcagcggcctccttccctcctgtcctacagacggggacctgcgcctggagagcactctgcccgctgaggcagagcccgagtatgtgctgccgtctgtctgtctgcagagcttgggagctggtgtgtgagggggggtgtccagagtcctgggcggtgggtgctgggttctcctactgtgggaagacctcagggcaccaagcgtggggctccctgatgtccacgtgggccctgcccatcccccccatcactgagtgcagagtctccctctgggttcccggatggttccagacgatgtgggtgcaggcggtaggtctctctgcagtgtggatgggtccagacgacgtgggtgcaggtggtgggtccttctgcagtgtggatgattccagatgatgtgggcgcaggcggggaggagtgaggggagcacggcgcagggccatgctttctgagccctgactggacacagcattgtatggggcggagacctggacgtcttgagctgggtctcgccgacttccccttccacacatcccaagctgcacaggaggctggcccgggtcccgagggcccctggaagctgccccagccgcgttgctctcagacaggggcgtcctggctgcagcgggggccctgtgccgcctgcggtgtctgagaaggcgtgaacgcctggagaagcccagggacagagactgcgctgggagcagagtgaatgtgtctgttattgattttctccacgtggctcccacgttattgcacacgtgattttgtacttggctgagattaaatattaatacattgaacattaaaagagttttcagccctttaaacaattgtttatggcacaattaaaaggcaaatgaatgatgttttttaggagcaagtttgttggcctgagtcttatttgtgagggctggagctgaggggaggccccttgagggggcgcagagagggaagccgtgtggcatggccacttgcagtgggcgggcatctgctatttattgaggcaagatgagggggcaggctgccctggtgcccctgctccagacccgcaaataccaggagcagcccctgacgagagaccctagccccctagcccatccaccgttttgatgtaaaccaggtttccatgagcctcccatgcggctgcagggggtgggggaggtgggtcagcagagagcgagccaggtgggcagatggggtgtgggccgctgccctgtgcagggtgctcccctctccctggtgaatggaccgtcacctctgcttcctggcgccagctcctcgtctgtctgacttctctcgtgctgtgacctgcagggtcaggaccgcacggcctttcctctgagctggggttcagtcacttgcaactgaaggatcctgactgagccaaactagttaaagtaggaaaagggcctctggagttttcagttacgtgaaccgagaacggcttcaggcacagtggagtccaggtgccactgctggcacaaagcctgggtctccttccatccctcagctctgctgtgtcctgggctgacttgactctgaggcagtggaaccctcagcgtggcaggagctgccggcagccccggaggaaaacgagcacctcttcctccagcatctgctctctcttggcctggaaattccgtcctgagtctccttcccaggtctcagtcctggcggtttgagtggctgatcagaatctcccgcgccgcccacaggagacccagctgggtccggctggtcagtgccaagccctggacctgcgtggtggcgcccccaaaggctgctcggaaccggcccgtgcaggtggacctctgtctgttggttcccctcttccctcttcacaccctttaggtgcttcctgcaagtctgaaaggaggtgcaccctggcccgggggaggtttgcggggtgaacacttaatccggactagtttcaggagggcttcctggagggggctgcatttgggtggtgtcctgatggagcagagattgtctttttggaggaccgggtcccatgtagaggctgtgagctgcccacacactcttcatgccatgcctctcctttctgtcccctgccgctccctgggccagagctggacagattcttcctgagcacctggtccaacccggctgaggctggtcagtggcgtggttaactcggggctgccccggggggctcctgccatctcaggattcccagcacggacccctcccctgcctgcctcctttgctcctcgttgcctgctctaaagggagggatttgggcttagcatgtccacccgatgccacttcttttaactgtcaatacggtcggcatctgccaacctttcccacggtgactggcccctccttgggccactgtaggcagagtgatggggtcaactcgacaattgctttcactgtcaacccaagttctgcctaattagggggaacggcagcgtggctgagaaaatgagggtgtgtgtgtttgagcacacgtgaggccttccaacctgaaacaacagctgtgcccgcggccccggagcctagggggctgtgtagccccaggcccctgacccggcccccaccctccctggccccggggtcctgtggtcgcccaccacggtggcaccaccttgcggggatagcacagaacacgggcttctcagacccagagttttgaaattaggcagatttgagtgatttttaagaacggggtgggagatcggaactatttcacattttccaaatacagtgaggctctagagtgacgtgaaaactggatggtgcagcacggcgatgtcagttatgtgaacagccgccaccctcgtgcgggcaaaagcggctgatgggaaggactggatctgtggctgccactccgctgctccgtggcggtggggggcggtggccgcccagtccactctgcagtgcgggagctgggctccgcgagctcctggcccccacgccgctggacactggccagcccgggtcgaggtggatctagggtatggcagacagagagctggagcctctgggcctcctgtgggaggcaaaccctcacttctctgtagctggaagttcagcaagcgagaagttttacgaggccgtcaataagattgcatctttgttctgatgccgcggtgcctgcgtgatgatttaaaaccgctgagcccgacgtgctcacgggccaggcctcattgtcaaggcacaaggctctgtcgcttaatcacacaccatgatggcgaagctctgatgggattaagcttcccttctgcatctccacctcccttattcctctcagagggggcctgtgaggccaggggcctgtgaggccaagcgcctcacaatcccgctgcctttggggacatcgtcatggctccaggtgtctgcaactctgctgtgaagggttccctgggggagccatcctcccctgaacgggcaccgggtgtcttgggaccatcccactccagctatggcactcaggtgaaccccgagtgttttgtgctgtgactgggaacccgggcattggcaggtgatgtggttccagctgcagcttcccgtggtccttgggaaggcggcttcagggacggtgtaagttgtcagcgtcacccctgggaagggctccgaagcagaaggatgggggtgtctgtctccaggacccagattgtcctatcgggaagagttgaacgagggtggggagggtctcctggggggacaccagagccgagcctgaaggtgagcagagccttcgccctgggtgagtttcgttctggctgagcagtttctctgtggcccaagggacctgcattggttttttgagttgggttaggggcagagagggggagtgatggggctgtgggggtggaggtgggactttgtttcacttagttttataccctccacgatgttctttcccatcaaggacaggaacacaccacccacaaaatgaccttggagagacttttgttattttttagataggaaaaaacaaaaaaacaaaaaaatccccaaacccaataaccatttgagctactttgatggtggaggcagcgaatcccggggaaagccaggctcctaagccccagacgcccctgcctgctgaatcaggtccccgcccagtgctcagatggtcacgggctctgggatcctgcgggatttggaggaagaggccgtgctgcgtccgggctggctctgcccacaccccggcgagagatgctgacttcacattcacctctgtgaagatcacaggatttaagctgtcagcgtgggacgggcatgtgctttaaggatgattgcgccagcaaagccgccttcctgagccatgcttatgccaggctcctcctgtctctgagcaaatgctggccgcccggcccgggagcttccggaagctgtttgctccccgtgtgcaggaggaaatgtgtgtctgcagccatgtgtgtgggccgctgtctcctgctgcacccggccttcctcacggcaagagctctgtgctctgtgggctctggaaggaacgttccgggccggtgtgtcttgagagtgttgggcagctgccgccctgggggaaggaccctcactaggctggcccggggcaggagcaggaaggatgcggctcagctgccgcctagctctgtgtgccaagtccctgcagggaccctggaagccgagaggggcggctgggtggccacgcagcggggtgggaggtgaggggcctgaggaagccgcggtgccgcgttccctgggcagcgtcgctcacacacagggaggctcattcacgctcactcagcacggccgtgtcaaggcactgcaagtacactgacacgcagcttgcggtgggagggacggtggggtcctcggaccacccaacacagggccgcagactgggctttgacaacagaaattcagtgtcactgtgctggagccggaagtgggagacctgggtgctggaggtttgctgcgatcctggtgttccttggctcgagaaaccatcacttggcctctgccttcatcttctcacctttccacgcctctcccgtgcgtgtctgtgtccacgtttcccctaagggcacagtcacattgaattagggcccaccctactctagcctgaccttgtcttaactaatgaccctgcagtgaccttcctcccaagtaaggccacatctcaggcaccgggatgacgccttccacactagaattcttaagggacccaattcaacccctaagagggatgcctgagctgaggtctgtcgtggacaggctggagctctatcccccgggcctctctcctgcctggtgcctcccatttaaggagcaggttgaaggagctgagacccccccttgggcattgagcactcctgtcttggatacaggcttccccaatgctgccgcctctctccctgacctcaacctgcttccctgcactgagcctcacctttgaacgtccttccttccccagcgcgtggagccccgcacagctggggcagctcagccgagtgcaggcggtggcaggtcccaggggctggtgtcttgggtggggcctggtgtccgaggcctgcagatcagccctgctagccctgcccagtgcccaggctgcccctttgcctggttgggggttggtggggcagggagcctggtgggcttcactctgggtctaccaggaaggtggcactaggttaatcattattgccccgaccccctccgtatgggggggcaggaccagctcagaaattttagagtaccacgcaaaataagaacgttgggcttcttgctcaaaaatgaagaattctgggacagcagtggcggagcatgcagccttctgagcgcagacgtcgggacaccagggacgctggccgggagcgagggaggggctttaccgaggaatgggtttcctcctccagccttgttctggagatcacgcctgtgcaatctttttaaatacagaacagaaaaaaatgccagccccctgcagcctggtcacgagaatgccaggatctcagggcacctgctggctgaccttcgctgagatagaatttacacactgcacatgctcccatctgaaagggatgccccgcggccttcagcacattcacaacatcgcgcaaccattgccactcattccagaacttccaccaccccgaaaggagcccatcagagtctccccactgcccctgtcagctccttgctgtccctgtggacttgctggttctggacacttcatggaatcagaattggtgtgacacagggccttgtggcgtggactacggccctctgagcggtcttgacctgttcacctaaaaccagacgctgaaattaaccaggcccacctctccaggccagggcgggtgaattcccggggacccagcccttgcctgcaccaggagagtaagcgacttattaatagggtaatttatgcgggtgcctgcgcaccgggacggaccagcatctatcatggctgttttgcgtttcttgatttcacgatgtctgttgtgtgctcaggcccctcctctccaaggtcccagctgtccttgccctgttccctgtgaagagtgaagaaccaacgcgggcggggagtggaccggtggggagagggccggtggggagaggaccggtggggaggggccggtggagagggggccggtggggagggggccggcggggagtggtttggtggggaggaggctggtgaagtagcgtcaggtgcgggcctggcgtcggcgagtcaagtcgagctgatccagggccttctttctgcagcttcatcaggttctcaattagcggagggcgctggcggtggaggagggcattagccgtgcctgctctcgggctctgcctgccagagtgccctcatgtggcatgagattaaggctcagcctctttcctgacagcaggttttccatttttcttctccttcctcctctcctggcaacaaagtcctttgctgggctggggggtctccactctgatccacttccctccttcctgcctccctcccacgccctggaaaccccggcccatgactctttccctgagggggccgcccgcagcctctcccccatgggggctttgctctgggcaccccctttcccccggggcgggtggggcagcggccgggactcaggaagatggtggcccagtggggctctctccttgggtgtgtgggagcggagtcccctcgctcttctgggatagaacgctccgttgagctccccaaactgctcccgtgccgagctctgggggagggagtctgttcagagacggtgcagtcctaccttttagaaggtacgcctgcctttttaagcagctcagctctcaacaatgcacaagtggcttgagtagaagagctgctcctgctgggaggcgcaggaggctgagcgaggcccaccctgcaggggcgaggccacggtttgtgttatttcccatgatgactccaaacgcacccgagtcccccgggcctccgcgcctccgtgtgcaggtcccccgggcctccgcgcctccgtgtgcaggtcccccgggcctccgcgtctgtgtgtgcaggtcccccgggcctccgcgcctccgtgtgcaggtcccccgggcctccgcgcctccgtgtgcaggtcccccgggcctccgcgcctccgtgtgcaggtcccccgggcctccgcgcctccgtgtgcaggtcccccgggcctccgcgcctccgtgtgcaggtcccccgggcctccgcgcctccgtgtgcaggtcccccgggcctccgcgcctccgtgtgcaggtcccccgggcctccgcgtctgtgtgtgcaggtcccccgggcctccgcgcctccgtgtgcaggtcccccgggcctccgcgcctccgtgtgcaggtcccccgggcctccgcgtctccgtgtgcaggtcccccgggcctctgcgtctctgtgtgcaggctcaagtttgccaacgtccatgcacgtctcagcctctcagcctggactggacaactgggcttcgggaattcatttaaattctacccgctacacgccttccctggattcagggcggcgtccagtgcattcatcacgcgtgtgctgccgtgaaggtgcggggaccccccccaaaaggcttccttccctgtcctgcgtcctgcccacaaggcggtgctgctggcaccaggcctgacctggcgctgccagtgctccactgttttgagttattgaccaacaattcactctcgggtcccgaggggaactggcctgaggccactcaagcagaggctcaatgaggaaagataaatatttcatggtctgggtcggtgagagagggaaatcaatagcgcatcccatcctcagtacggcgcaggcctcccacccaaggcagcgagttgcatcctccgtgccgcgcgggccctcccacccgaggcagcgagttgcacttccgggcttgttctcttcctccctttaaggcaaggctgcaaactgccaggccgatggcccgtgctgggagcaggcaggtgtcctgactccgcctccagccggtgaatcagagccctgagattcaccaagggccccctgcccgggtcgtggaggcagagcctggggctgggagaggcccttcaggacccctctgtgggagccggacgcaggcctggggatgttggaggtgggagcgcttccaggccccttgtgtaggaccagaggctgctccgaccctgctcggggctctggagacagaagaacggcatgagtgtttcacaaatggtgcagacagttcacaggtcaagacaggggacaaaagtgaccacttttagttaaaaacaggtgactccgtcccaggacaagcacgatgctgtgttaggtcccgttagtccccttggaaagctgtcggctttccctggagaggacctcgttctgtccacgccactgccctgcgagcgagagggagtgcgagcggggcgtccacgcgctcccatgggggacctggggctgcttcccgcttcccgattttccttcagcgctgctcgtggcgtgccctttctcccgtggcgcagtcaccagcaggacgtgtgtcccgctcacgctttgggaaacacggccttgtagcaggagctgctctcggggttcagcatcgggggtggcagagcccagtgcctgctggggcattgccaggcatcgtggagctggacccagagccaggggtcccagctgctgctcctcaaggaccctgtggctcaggaaagccctcccattgctaacgtgtcacccgaagggcttggggacctccacgcaggatgggcttcaaaagtcagctcaggcggtgccctggcctcgggtgcgcggggagaccactggcctccctcatgccggctccctgctgactgtctcgtgagctcctggcagcccttctagaatgttctggcgtggctccctgctcacgtttctaaagcaactatcagcccatcctcaattaccgtgtctccaggaccacagacgacctggagcagcaagagtcagtgctggggccgggcgcggtggctcacgcctgtaatcccaacactttgggaggccgaggcaggcagatcacctgaggtcgggagttcgagaccagcctggccaatatggagaaaccctttctctactaaaaatacaaaattggccgggtgtggtggcgcatgcctgtaatcccagctactcgggaggctgaggcaggagaatcgcttgaacccgggaggtggaggttgcagtaagccgagatcgtgccactgcactccagcctgggcaacaagagtgaactccgtctcaaaaaaaaaaaataaataaagagtcagtgctgggacgagaggcaccggtaacatggccagtgttgcagccggaggcgggcagggctgacctgtccagggaccagcagagctcgggcaggaggtgaccctgagtcgggggagagggggcgtgggagcctggggctgggggaggagggaggatgtcactgtggatgaggctggttcccagcctcaggagccaggcccgggcccctccagctccacctgtgctcacctgggcaggtgatgccccatgctgagcctctgctctctggtccttagggtgggggtgcagttcatgccccatgggctgggtgaaagaataaacccccacccagtgggcacgtgcggcgggcacccagagtgcttgaagtttccttgtgaggctgctgctgactctggggagggacggtgtcgttggagtggggccacctggcttggcccgttgcccttggcagcaggaatacagctgccctgggggctcctctgccacacgggcactcaggggtgctggtcgttgggtccaggcagggtgggggcaagagccactgaggggccctttgtttgcatcttaggtgacgctgcagaggtgagtggccggggcatccagagcttccctgaatgactgggccacgacgatgaaggcgtcagggctgcagcctgctgggcgtgccccagccaagttttcaggacggcctctgcttctccttcggggaaggagcagccctactccctctgatggggctgcctgggagggttggatttgttgtttgtagggaaagactggggcggagagcagggtgctgtggcccctctcgtccctttctggttcctggggctgtccgcacagagcaggtggggacacgctggctggatttcatctggatcagaggagggtgagaggatggtctcctggtggggagtgcagagcctcagctctggagtgtggagaaggatccagcttgttgggtggtgtatggtcagaagtggggacctcggggcctcagatctggcctctgatcccaactctgttcccctcggagccacccttccctcatccatcaggagccagtagcagccccaggacagctgccgtgggataaataaaaggagccgccttcaggagctgcctgccgagtgtccacagaacgtagcgtcttcccagcactcagcgggtcctgatgggcctccttcccaccgccctcttccgagtgtggggagctcaacccctgacttggggtcccgggacattcagttttgtgtgtgatcagggaggcagcgcctgacccacagaaagcacctgctactggtggggtctcagatctgtgcacacctgtgtcccgggctcctcactgtccgggtggtcacactgtccctgcgctgctggacttgggggcttgggtgcagccagccttgtgctcctcagcctccctggtacaggaggactgtccatctgcctggcaggggcaaggccgtcttcagcggagagacctggaggccacgtggtctgctcagaagtacctgcatgcagtttgatgccctgctgcagcaatcttgaaattcttagtaattttatctttgaatgctcgctttgtaagtgcaatctaaggatggtggcgtgagcatgactgaaggaagctggagatggtcagggtgcgagtccactgcggagccagtaggtgccagtggttcgagaggccacgctttcccttgactcagagctggccccaagtgcagaaaggaggtggtgttgctctcagatgcccacacaaccaaggacacatcccccccgtctccctgggactcccatgtgagctggccacctgcactgcagatgacgatgtggaaggagagagaaagacaggagaccgcggcttttcctttcagtccttcgtacccaacagcaactgagagggcgtcccggcagggtatgaatggccagcaggacgctgaggctgcgtggcgtttccaccgtgctgcaggaacaagatgcacatcgtgcaggagccgcagagcacgcgtgcagaggtttcggtggctttgccccgcagctaacgtgtgcgtgtgtgccttgacttatatttgcattacttagaatgacattcaatagcaaatgaaagacagccggcaagtcaatagagagaatgcggaaggaaggagaaggctttgtttgtggctctgagggcacttttcctcctgcatttgcattttgcactgtgcagatttgcaccgtgcagccacccgggcctcctcgggtctggggctccatttccagcacccccacccagcgctgtgggcccctcccccacgcacctcccccactttggtggtgacagttggttgtggaggaacaatcgtcagtgatgggtgaactagctgtgtttcacgtggcctcctcatcactctgccaagcccctggggcaggcacattttggctgccatcgactctagaatgttctctggtgtctccagggggtgtgcagagctggtccctcccagcgaggagctctgctcacaggttcacaccccctgccctgttctccaagatgggaatgtctgatgagagccccagagaagaatcagccgctgggggtcggggaggtgttggactctcttgaaacaaaggaggcccaagcctggggtcacggggctgggggtgggggtggggtgggagggagtgggcagtgacctgagaacaggaagggaggtggaggtcttgggtcacgggtgatggatgatggaggaacaggcccaggaggccctgcttgctgggggcttctttcctcttgcgtagtcaccctgtggggggctctcaaactcacagagtttggccgtagggaagtgcaggggtggcctgggaggctgcaggctctgggacagcctggctcacacaggagatgggatggcgctgagaggagaccccggggcgcccagcgtctcaggctataaggagcagccactcattgtgacacccgatggtgaaatgctgcattattatttatggtgttgaataatcacagcacaatcattgcaggccacagggcagaaagtgctaatgtagtttaaaaacagtacatttgaatctggacactggcaagaaaataggcaaaataaatacttttgtccacccctccctaccctcttttggtgacttggggtggcctgggtcggtgctcagcccagggtcccgcggccagagccaaccatggcgcgcctggtctcctccagataaacgcgcgcccacgtctctgctgggctttggaattagctcaatactcattcagacgcagagtgcgtgtgccctgccaggacagacgtcattgctgtgcggtgcttgagtgccatcaataagccacagaagagaaatccggaaacaagggacgcgcagcgtgattccgtgccacggcgtcaggagcggcatgtagcatcttttggtttgagagtaaaattccgcaatcagaaatgaaatccgagcaaagaagcaaagcgcacagaggctggagacgctaaagcatccaggcaggactccgccaggtgggcaggcagaggcctgtgcacaggcagacggtgtgcccgtgagcaggacatgcttgtagggtcacaggtcacccacccgcaggacacgcatgcaaggtcacgggtcagccaccagcaggacacgcatgcagggtcacgggtcagccacccacaggacacgcatgcagggtcacgggtcagccacccgcaggacacgcatgcagggtcacgggtcagccacccgcaggacacgcatgcagggtcacgggtcagccacccgcaggacacgcatgcagggtcaggggtcagccacccgcaggacacgcatgcagggtcacgggtcagccaccagcaggacacgcatgcagggtcacgggtcagccaccagcaggacacgcatgcagggtcacgggtcagccacccgcaggacacgcatgcagggtcacgggtcagccaccagcaggacatgcacacccatgtgtgcacatgggtaggtgtgctcgacccacacatgttgtgccatcaccccatccttgtccttggagaaagggctattggccatcgtgacggggagcctctcagctgcgactgggccctgggagccatggagtcttctggccgcctctcctggccaccaaccaggaaccccaggccccaggcccacggttgcatctgctgtgccatcctgtggacaaacggacgatccaatccagatggcactgcaggggactgaacggggctctgaaacccggccggagctgccctcaggccaccctcctcaccttgagccattcccctgctccgtcacctgtgtcaggcctgggtgccgccaggaggcctccttccagctctctgcaagctggccccgtgttcacgggcatccagcgggatccaccatggaaagacagctttctcagaggcatctcagcacgtgggcccagccagaacctcgagggcttctgtccctggagggcagggcagagcgggaggacacagggacacagagaaggtatcagctggcgagggcagggcagagcaggaggacacggggacacagagaagatggcagctggctgagggcagggcagagcaggaggacacagggacacagagaaggtggcagctgactcggcgggagcggaaggtgctgctttcttcgaggtccccctctttgcggctcacccttctccctctatggcccccttaaccccaacccccctcggctgcctctctgagtaaaggacaggccagcgccgagcaggtatgtcccctgccagggtcccccgcacacctggatcttctaggctggggagtagtggaaggatctgcggggctctcgaagccgtctgggaggaacgtcaatgaccagaggaaggaacaagggtttcgggtgggattggccaattccctgggtcatctcagaaccacgagcttgtcttcctgggttacagggtcctgagcttggccgaaaagggacaaacgaagggccgggtgtgatgaccctgcataggtttgacagccctgtgtccttccaaatcaagtgagtgggtctgggtccccggccccctccagcctggggtccaagcctccctggtctcctcgggcagtcagcctctctgctccagtgccgtcagttgtcacctacgtgggtaaaacgccaggagaggctggatccccagctcaccggcctgtggcccgggcatcctgggcttgcagagggagggccgagggtggtaactaggaggagtggctctgagccggggagggaacacggccagagggggatgaaggccacacggagcaccgcgggagccccgccgtctgcgcagggttcagcctttcagcctcgatgtgggaagtctctccatctgttcaggttttctttgggtctttttaccagccatgtttcgcagtttgcagcgtacaagtctcacacttcctttgcgaaattattcctaagtagcttattctttctgatgctatttgaccaggacgctttctgcatttcatcttggggtgttcactgtcagtgcagaaatatcctacgccccatgatcttgttaaactccttcgatcatcttatcaggttttacttcattttattttatctttgtagattccttaggcgattccacctacggcgtgaggcgtacttctacatcttttttgctaatctcggtgatttgagttccatgttcttgcctcactgccctggctggaacccgctgtgcagtgtgggaggagcgggaggggagggtccccttgacttgctcccttccgtggggagacggtcaggctttccccaggaagcgtgctgtaggtttccatagattcgagacggtcaggctttccccaggaagcgtgctgtaggtttccatagattccattgctaggttgaggaggttcactctcatttctggtttgttgaaagtttttttttaattataaatgggtgtcagattttgtcaaatggattttctatatcagttgggatgatcatgtggcttttgtcctttattttattaatatgatttattacattaattgagttctggctgttaaaccaatctttcagtcctgggaaatatcccacttgatcatggtgtacagtattatctttttaaaataaattgttggatttggccaggcacggtggctcatgcctgtaatcccagccctttgggaggccaaggtgggaggatggcttgagcccgggaggtcgaggctgcagtgagccgagatcgtgccattgcctgggtgacagagtgagaccctgtttcaaaataaataaataaatagtcgaatttggtttgctaagttaaaaaaattaagtaagtgtcccgctcagcagcattaattacattcacgatgttgtgtcaccatcaccaccagctacatccccaactccaaacagaaaccctgtctccatgaataacaactacccattcctctccacccccagcctctcttaacctagaatgtactttctgtctgtgaattaggctcttctagatatctgatgcaagtagaatcatacaacatttgtccttttgtttctggcttatgtcactcagcacaatgcttccgaggtcgctcagcagggggcttccgaggtcgctcagcacggggcttccggggtcgctcagcacggggcttccggggtcgctcagcacggggcttccggggtcgctcagcacggcacttccgaggtcgctcagcacggggcttccgaggtcactcagcatagtgcttccgaggtcgctcagcacagcgcttccaaagttatttacctggtagcgagtgtcagacttccttcatttttctggctgaatcctattcccatgggtggatggaccgcattttgtcctccattcatctgctgggggcaactgtgctgtttccacctttcagccattgtgagtaacgctggtatgggagcctaagtgtctgtttgggtgtttgtcttcattcttccggacctacccttgggagtggaattgctggatcgtaaggcagttcggtgttccactatttgaggagctgccaaatcgtctcccacggtggctgctccattttacattcccgccatcaattccaacttctccacatcctctctgaggcttgttattttatttttatttatttatttttttgagacagggtctcactctgttgcccaggctggagtgcagtggtccaatctcagctcactgcaacctccacctcccgggttcaagcgattctcctgccttagcctctcgagtagctgggattacaagcgcatgccaccacacccaactaattttttgttttttggagagcagccgtcctatcgcatgtgaggtggtgtctctgtggttttgattcacatttccctagtgaccagtgagtgctgttgagcatcttttcatgtgcttattggccattttatatcttatttggagaaacatctattcgagtcctttgcctatttttaaatggaatttttttgttgttgaagtgtagcagttctttataaatcctgggtattaaaacccttatcagatatatgatttgcaaatattttctcccactctgtggttgacgtttcactttcttttttttttttttttttcgtttttgagaaggagtctcgctctgtcacccaagctggagtgcagtggcgggatctcggctcaccgcaagctccgcctcccgggttcgcgccattcttctgcctcagcctcccgagtagctgggaccacaggcgcctgccaccacgcccggctaattttttgtatttttagtagagacggggtttcactgtgttagccaggatggtctcgatctcctgacctcgtgatccgcccgcctcggcctcccaaagtgctgggatgacaggcatgagccactgcgcccggctgacgtttcactttcttgatagtgtcttttaatgcagaacaactttaattttgatgaatccaatttatctgttttctgttaaaaaaatttttttttttttgagacagagtctcaatctgtcccccaggctggagtgcagtggtgcgatcctggctcactacaacctttgcctcctaggttcaagcgattctcctgcctcagcctctagagtagctgggattacaggtacccactatcatgcctggctaatttttttatttttagcggagacagggttttgccatgttggccaggctggtcttgaactcctgacctcaggtgatcctcctgcctcagcctcccaaagtgctgggattacaggcgtgagccaccatgcctggccctgtcttttttcttttgttgcctatgctttctgtgccatttaccattgccatgttgaaggtcgtgataatttgcccctatgttttcttctaagcgttttatagttttagctcttacatttaggtctttgatccatttcatgttaatttttgtatatgttgtaagataaatgtccaacttcattgttttgcatgtgtaaatacctttttcccagcatcgtttgttgaggaggctgccctttcctcactggtgttggtcccttattgaaagtcaatggaccatgtatatgggggttcatatgggggttctctgttctactccattggcctctacatccatccttttaccagcagcacattatcttgatgactgtagctttatgagtaagttttgaaatcagaaaacgtgagttctccaagtttgttcttcgttttcaagatcgtttgggctatttagggttccggaagttctatatgaattttaggataaaggttttcaatttttgcaaaaattgctgttgggattttgataaggatgacgttgaatctgtggattgttttgagtagtactctcatcttaacaacagtaagtcctccagtctgtgaacacgggtgactttccatttatttgtgtcttcttaatttctttcatcaacgtcttgtagttttcagcatacaagtctttttcctcctgggttgaatttattcctaagcatctgattcgtttcgatgctatcgtaagtggggttcttttcttttcggattgctcattgctagtgtccagctgacttctaagtaatgattttgtaccctgaatctttgctgagttcatttattaggtttaacagttttttttttttttaatggttctctgggcttttctacatggtgcatatcatctgcaaatacgtgccattttagttcttcctttccaacttggataccttttgttcctttttcttgcctaattgctctggctaaaactcccagtattgtgttgaatagaagtggcaaaagcaggcatccttgtctttttcctgatcttggggagaagctttcagtctcgtaccattgactgtaatgtcagttgtgggtttttcatagatgacttgatttactaaattttactaaggatattttggtttacgttcatgagggataatatcttatagtctgttcgtgtctttgcctggctttgataccagagtaattctggtttcatagaatgaattagaaagtgtttcctcatcctctaccttctgaggattttgtgtgagattgctgttatttcttctgtaaatatgtgatggagtttactagtgaagccagtgctatttgggcattaatttctttacttgttgtgggtgtcttcaggttttctctttcttcctgaactcattttggtaatttgtgtcattctaggaatttgtccatttcatctaagttgtcaaacggttggcataaaatggttcataatgctcctttataatccttttaatttcaataggatcagtagcagtgttctctcttttattcctgattttagtaatttgtgtcttctctctttttttcatgggcattcttgctaaacatttatccactttgttgatttttttcaaaaaatcaagtttgatgctgctggttttctgtatcggctttctgttttctgctgcactgctgttcactctggtcttttatattatcttccttctgcttggttggggttggatttgttcttctttttcttgtttcttttggtggaagattatattattgattatattattgatataatatgattatattattgacctttttgcctttgaaatatgggtatttaaagttatgaatttcctgctttagctagatctcatgcgttttggtatgttgtggttttgttttcataagttcaaattattttctaattttcttttttgtgatttcttttttgactcatgggttatttagaaatgtgttgtttagctctcaaatatcaacttatttctccagtttatttttatttttattttttgaaatggagtctggctctgttgcccaggctgaatgaaatgcagtggtgtgatctcagctcactgtaacctctgcctctcaggttcaagtgattctcctgccttagcctcctgtgcagctgggattacaggcacatgccataatgcccagctaatttttgtatttttagtagagatggggtttcaccatgttggccaggccggtctcgaactcctgacctcaggtgatccacccaccttggcctcccacagcactaggattacaggcacgggccaccgtgcctggctatttctgttcttggtttctaatttaattccattgtattagagaacataccttgtacgatttaaatacttttaaatgagtgagacttgctctgggtctagcctacgggctctcctgaaaagtgtggcactgctgctgagtgctgtcatcatggggagcgatctataaataagagtttgggtaagttggttgacagtgctgttaaagtcttctgtgtccttactggtactctgtgtagatgctttattcgttatggagaatgggcatcgcaatctctcatgataattattgaataatatatttctcttttcagttctgtctcattttacttcatatattttggagttctcttgttaggcatgtatatacatttatgtctttctgtcaatattgacccttttatccttataaaatgtcctctgtctctagtatttttttccttgaagtctattttgtcagatggaatatctgtgttccacctctgttgcagttgttatttgcatcatgtgtatttttctgtccttttgctttcagtgtatttgcatcttgaaatttaaagcatgtctcttatagatggcatgcagttgggcctggagtagtttatccagtccaataatttctgccacccgacagtgttgttgttggtttagtggcatttttgtctctgacgttttgttccttgctttctacatgtctcgtgtcttttttgtttctgttcctcctttactgccttcttttgtgttaagcaaatatatctcagttaccctgttagctaattctgctgccgattgtgttaattgttaaccatgttttgagttgtgttcttagtgattctccaggaaaccagtatatatcttaatgtattacaatctacatcaggtgaatactgacttaattccagtaaaatgtcacctctgatccaggacagagccgttcccgcctgaattgtgactgcacacccagtttgtccctgtgtccctctagcctgagggtggcgttggcttcctgtagttgagactttccgagttgctcctcatccccatggggaccttctcacacctcttcaaccggcatcccatatcgaacccctgggtatgtgctgttttctcccatggactccaatgggtgcaggcatctccacctgctgtggccctgaccctccccttcctctcgatgttcatggggcatttaggggcttcgtctggggatggattaaagggcctgggctcctggggaggagctcccctgttctcccgggctttcctcggtctcccactcccctcaccctttgtggattttcctgggggattttactttattaaacgttcatgagcagatattctgctgccaggaaagaaaagcaatgaccagagattcggctgtgaaaaaaagaaaatggaggggttgggacaccatatcattcataggaccccttcattccaaagctcagcattgggctgaggcctgggcggagggcaatggagaggtgcagcgtgggggctgagtgcggcttggctgggtccccaccggtggccacggcacctgcaaggccacagggaccccatgcggggaatccgtgggcctctgtcgtgaactgcagccagggaccctgaagggctcgggcagctggggtgctctctgcttctgctgcacgcctggctggtgcctgagcagctctgcgatgcgcatcatggtcggggctgttttggggccgtttccaacaccagcagcgtcgtggctccacagcagcaaggcttcctgaaggaagaagggggcttcgcagtatagttcgagtcgggctctgtttctttccatcccaaacacatagagacgaccaaggccctgatcccaaaagaagaacccaggctgccggcgatcctggggacaacgatgttaactcagggacaggcgcagtctctggaccaggccaggtcgtggtgcacacactcgatctctgcagcgtttcccacatgggcactgcggaccgggaatgtcaggggaacgcgggcaccgtggaccgggaatgccaggggatcgtgggcaccgccgaccgggaatgtcaggggaacacgggcactgccgaccgggaatgtcaggggaacgggggcactgcagaccgggaatgtcaggggaacgtgggcactgcggaccgggaatgtcaggggaacgtgggcacggctgaccgggaatgtcaggggaacgcgggcacggccgaccgggaatgtcaggggaacgtgggcactgtggaccgggaatgtcaggggaacgcgggcacggctgaccgggaatgccaggggaacgcgggcactgcggaccgggaatgccaggggaacacgggcactgccgaccgggaatgtcaggggaacgtgggcacggccgaccgggaatgccaggggaacacgggcactgtggaccgggaatgtcaggggatcatgggcactgtggactgggaatgccaggggaacacgggcacggcggaccgggaatgtcaggggaacgcaggcacggctgaccgggaatgtcaggggatcgcgggcactgccgaccgggaatgtcgggaacgcaggcactgcggaccgggaatgtcagcagaacgggggcactgcggaccgggaatgtcagggcaagagggaagttgtttgctagcttgtcatatgtttagctaattatttaatttccctaatttaaagtttcaccggattaacatcaaaacaaaaatcttgtgattgcagcatcataaagcaataatgtaattaacttgtttagggtaacttactaacttggctgattgcaaggcatggggtctgggggcaccacacttgaggtggtcggggcgcttgtcaggcccaggctcctggcctcagcgcggcgcccagctcccggtgcacagggctcccaggccccggtgaggatcaggccactgtgccgcctcagggagtgggtgccggcctcacccccagggctggggctctcactcaggctgcgggcaggcatctccttggcccagaagctctgaccttggccacagttgggttttgagcacgcagcccagcagaaatgccgttccgaagccgtgcaggctgtgcaggccgggacaccctgctaaccaggagtggaattgagaacaggatttctctacaccacgagttcctcccagaactctggaacagattccaatgttgtttgaaaagttaccaaaccctgtttgatcagcatccattgctgagagagcagctttctctcttccccttttcctcctcccctctcccacctcagcttccacagaggtggcgtgcatggcgggaaccgtctgtcctatcggagcctggagaccctgggtctttcccttcagcagcttccacagaggtggcctgcatggcgggaaccctctgtcctatcggagcctggagaccccaggtctttcccttcagcagcttccacagaggtggcgtgcatggcgggaaccctctgtcctatcggagcctggagaccccgggtccttcccttcagaaatccctgccatctggttttgagactggctttgggggacagtggccctggtggggattcgggcatgaaaggccccctgttgaggtcgagcctggcagcatggggggactcgctcgtcttcgtggtgggcctcacagacacagccatctgggcacacaagagcattctggccgtgcatgtgtgcaaatgagaaccgtgtgcttcagaaacagactggagcgtgtggggacagacgggaactcacacacacgtgagctgccccaggcccagcagacactgaacgtgaggtggcttgctacagccagtgggcagaaggggcaggttttggtgttgggaacccagtccccgaggctgagaaactgcccacaaacctcctgctgttctttgaagtgaggggttcattttgcgtggagcccggagcacagagcaggccccataccaccaggcaaagcccacctggctcacctgctccctagccccgagatggtttcaggatgaggcagtgtggtcaatttggagaaaaatcataaaaccaattcaagcctggctgcccaggttttgggatccaccaactgggctgctttttctcaattttagccacatcgccctcagttcgaggaagtacttcccatgagcttgtgctatggtgtgaatgtttgtgtccctccaaaattcacactgaaacgtcatccccagtgccatagtacggagccttcgggaggtcagtaggccgggaaggctctgccctcaccaatagattagtgccagtagatacaagggcgggagggatgagtccgttccttctctcccttctgccatgtgaggacacagcaccgctcccctccagaggacacggcagcaaggcaccatcgcagaagccaggagccgctgtccccagactcgaggctgcagtgccttggtcttgcacttcctggcttccagaactgcgtgaaatacatttcaatgctttataaatgacccaatcacaggtgttctgttacagcagcacaaacacactaagacagcttggtagaattttctagaagctatctgctgattaaacaacagggaaaaggtggagtctgagagggagtagtgtgtgaaggggccctgctgggagaggttttgggaatctgtgggcggctttatagttcttggcactttcattttcctcttgggggtcggtttggtctaggttcccccagtgccaactctgacctaatgggggttgggtttatctgacaggtgattgcaggaggagagggatggaggaaaacagtgcccaggctgggacaaagggggctcggctctaccggcatttatccaccatcccatctctcggtgcgttgacgccctggggagctcacccccaggcagaagagcacaggtgcctggtgtgttcgtgaagcatcctcagaacctgggggggtgtctagggtcctcagaacctggcatggaggggggtgtctagggtgggctgaagggcatgcacagcatctccctttaggaggaggaagcacctgccatccagcaacccgccgtgagcgccgtactgcacagtcctccctcacctctccgaggacagactctcctgcaactgaggagctggatgtctgccttttcttacattctacatctaccctccctttctgagtggtgtcagatcctcggcttgggaagaaaatgcaggctgtggtctctcagacagctcttcatggtgacacatttgctcggcacctgctgtgtccccagatcaatgccagtggcctggggtcagagggcaggtgcacgatttgggtccagtttttcccagtgggtcatatgtggatctggggcaagaaccaccacccaagaggacgctactggcatgcagccctgagcatttttctgtttttctttctcagctttacatgttcagggtgtagtcagatggctgtgtgcaactgcagttcactttcaaagctgtgtatctgttttgcgaatgtgccgccgtttctttacctgctcattggctggttttgtggatgtgctaccatctcattggtcagttttgtgaatgtgctgctgtctatttacctgctcattggtcggttttgtggatgtgctaccatctcattggtcagttttgtgaatgtgccactatctatttacctgctcattggtcggttttgtggatgtgccgccgtctcattggttggtggcatttgcgtggtcctcagctttgggttgttttagactcagcttcctgaacactcttgtccgggtctctcatcttctgaacactcttgtccaggtctcgcatctttcactttggctgttctgtgggtgtgtcgtgcgtctcattgtttgatgactgaatcgccattataatagcatgaaggtgcagctcacaagcgtccacacaggcgaattcacgtggtggctccagaggaatgttggccttgcagagtcttggcatctccgtggcttcccatgagcctgcgagaatgctgggcctgtgatggtgacagcgagtcttccctgtcctcaggggtgcggccttcaccttggaaacatcatttgtccccctctgtttgggttcaagtcaggttcagtgactcactagaaagacagacctgagaaacgcagttctagtcccgattatggtttattaaaacaaaaagacgcgttaaactcagtgaagaggagacgcttgtggagcagtcatgggcggcaggcatgagctgctgggagtgctctcccgtggagctgtatacacagcactgtttctcccagcagccagcccgggaggctcgcctgagctttggtggccatggtttttactggggctcagtcatgtagacttggagtccctgtgtggctgaccctagttactcagtctcaagctgaccctgtgtggccccaacctgaaatcccatcatttccttagactacccaacgtggcccaaagcccccaaaatacaatgttctaatggctcaggatggcttcccaggtgctcgttaattgctggacttttatttggaatgtgtggggtgtgggcagcccaggcctgctgagctcaccgtcactgcacgccctctgatgtggcctggctccaggctgttggcaatctgaccctcactcctggggtttccacaactgtgagttccctggcgggcccctgagggaagttctagagaagaaagaggaacacaggatcagcctcaggctctgggaggagaactggaccccattgtttgggcttggacagctgtccaattgctcaggacctgggtgctgggtggaggcctcatcagcaagtgtcctgactccacgggtggagggatctcacactgcccaccacagtggcagcctcagagtaagcacgagcctctcgccctccatgcgtgtataaacaacatggctggtgggtgcctaggcccccagggaggcccctggtatgaggccagcggagggggcgggtagggaggagccctctctcttgcacttaggtctctggagtgacagggatggccctgccccactgacccaggcgttcaccccagagaagcgtgcaggcaggtgagaagcttgtttggacctgaagaccagcctgagcgaggagagtcttgtgcagacggtttatccaggaggagcccggggagaggggggtgggaaaagccacagttttggaggtcagcaaggtcatgtgggggcagactcctcctcctcctcctcttcctcctcctcctcttcctcctcctcctcttcctcttcctcctcctcctcctcttcctcctcctcctcctcttcctccctcctcttcctcctcctcctcttcctcctcctcttcctcctcctcctcctcttcctcccctcctcctcctcttcctcctcctcctcttcctctcctcctcctcctcctcttcctcctcctcctcctcttcctcccctcctcctcctcttcctcctcgtcctcttcctccttctgccaggacccttcttccaggacccctgagaagcgcatagaatagcgtccaggactgtctgccccaggcacgctgaccactggctccactcccctgggcaagggtcgcccctgggctgctgcctcccagcgacacaggcaggacccagaagcctggtagaaagtgaccatgtgtggcaggtacaagaggccgagtgcggtcaacttgaagggacaggaagcctgcaggcagtgaccactctctaggctgtgctcagaggagaggccaaggggacacaggcaccagggccgtgggacacacctgggctaccccagctcctatcaggcaagcacctggagcctcactgtggaggggagactgtggccgccggggcgagggtgacacagggacacctgctggagaggggaacccagggctggctcatccactgcggccataaaacttcagcttttcctggatggtcactgtgcttggccagaggtcactggtgggaccagactctggccaggctttgagacatacgtgcctttccgtgtggtaggcctgaccttggaaggggaggccaagacctccaccccctcccctccgccctggcctgcgctgctgggaagtggatttggaggctctgttgctctctgcacagcccctcctggcctggcggcccttctggagcctgggagcagaggtgaggctggcatgggcacgaaatgtggaaatgctccacgcccccagggcttgcaggggaagcgaccgacgtaggtgtgtggccctcagggacagccccgggaagggaagtggccgatgtaggtgtgtggccctcagggacactcccaggaagggactgggctgcagaggacccgctcagggaagcccggcccagggcagggcaggtgctgaccctctgcatctctgcccatggtgtttcccccacctggagtgccctggccagtggctcaaatcctccatggcctcgagcctcccctttaggttccaatgccgtgctccacacagggtgctgtgtccagtgtcactgagtgaatgggagagtacatgagggataccatcgaggggagtctctgctgggccccacctgctccccaaccacacactcccccagacattcctctatcgagggcagtctcccccaggtcctacacagtcccccagccattcctctatggagggcagtctcccccaggccctatacagtcccccagccattcctctatcgagggcagtctcccccgggccccacacgcccccgcagccattcctctatcgagggcagtctcgcccgggccccacacgctcccctagacattcttctgggccccggggcatctgtgtggctgctgggacccccacaggggtggcgggtgtggctgcccctgagaatcatgctctgtagtgtcccgcccctggtgcagagaatcatgctctgtagtgtcctgcccctcgtgcagagtattatgctctgtagtgtccctcccctggtgcagaggatcatgctctgtagtgtcctgcccctggtgcagagaatcatgctctgtagtgttctccctggtgcagagaatcatgctctgtagtgtcctccccggtgcagagaatcatgctctgtagtgtcctcaccccggtgcagagaatcatgctctgtagtgtcctccccggtgcagagaatcatgctctgtagtgtcctccccccggtgcagagaatcatgctctgtagtgtcctgcccccagtgcagagaatcatgctctgtagtgtcctccccccggtgcagagaatcatgctctgtagtgtcctccctggtgcagagaatcatgctctgtagtgtcctccccccagtgcagagaatcatgctctgtagtgttctccccccagtgcagagaatcatgctctgtagtgttctctccccagtgcagagaatcatgctctgtagtgtcctccccccggtgcagagaatcatgctctgtagtgtcctccccctggtgcaggatccggaggggctgccaggccaggctctcagggaaggtctgcggatgcccaagtgcctgcacacctctgagggcccgtggcaagtgtagaaagcaagctctgggcagggctggctgctgccagcctcccacctccttggttcctcctttgtcctgcaggcttgtctcttccagtcttaacaatgctgctctcaaaagtctgaagccatagaatcccttcgaacagctgattcctctggagaatccaaaaacataactcaattcccaaaatttaactttttatacaacttgcaggacttgatgtggcgtatggagcactgaccgtccatgtggcaggactcagaggacgcgggcaacacagtgcccaggacagagaggccacagaggagcaaacgggcaggccgaggacagtcaagaccaaggggtgccaggcagggtgtgggcttcttgggcccacaatgacgggccctccatcgggatcctgtggggcaggccaggggcaggggcaggtggcctcataagcccttgaggaaggtgcagggggagttgctcccactccatggctgggggacaaggggaattgcatttccaagggggctgagccaagcatcctcaaaggcggcagttttggagcgagttggcaccataagcacagaagacagcaaacgttagaccctctcccaactgtggcggcctggagggagctcatgccacctcttctcgaagggagcgccctatgacctcctcaggtgaaaagacagagggcagtgctggcaagggcaccccagaccgcccccaccacaggtcggggagatgctgcaggtgcctacaggacactcagcttgcagtcatgggaggtcaccgccacccccctgcggggcctcctgagaactgaggccaacagagcgccctgcatgcccagaaatgcaacatgctctcccttccttcccctgcaggacccctcttcagtcactcactcccttccttcccctgcaggacccctcttcagtcactcattttggggcaattgaaggctttatttggaaaagacataccaaatttcctcagctgagcagatttttaagtagcaaattattatcaacccgaactgggaggccaagtcgtctgtagaccctgtgaggagctgggaggtcacttccctttcctctgggtggaaggggacgcctgagagccaggggcagaggaagaggcagaaaggagggaggggacagggagagaaactgcaggtggacagacaggcagggcctggagtcctggagctcagaggggacaggagcccacccacagggacagcccaactctgtcttgtctttttgcaaaatgctcaagctcaaagcccggctgaggctgctttaaattagatgctgcctcagcgggtccctctggagttgttggaaatctaattagccaggcagcctggcacaaatgtcctaattccctgacgctgggggacgcgagtgtctctttgctgctggggttcccggcctcagcctggcctttgcactctgcttgttttccaggatgatgcctatcagaaaccctaattgttttttcagaaacggctaattaattaggctcagcctcttgaaaggcacttaaaatactaacgacttgctaaaaaagggcaggacttgaaagcaaagccaaggtccaaagtgcccaccagcgtgaggggtctgctgcctccctgcggggaagccctggcagagccccttgctttgctgctcacagagtccaggacatgagagccgagcccatgcaccagtgactcacgccccggcacagatgagcccagagcccggaacagaggccgtagcaagaccccgggagcccagcctcccctacccctccagccccgctctgggccccaggaggctgacctccatggatgtcccagcaatctgtctctggcctctgggtgggtgtggccaatggagtcatccgggacacggaggtgggaagggactgggccctccttatcaggtctgagggtcaggggccctacatctgcttgtccctgttctcagcgccaggctcacctcatcccctgccccttgtcagagctccttctttgaccctccccaggggtccagctcacttgtttgttagtgacctcatcacagacaagttctcagccctcccatggggcggtcggtccttcaggcactggaaatacagcggtggacacagtggtggacctcccggtatgtcctctgttcgactgaacagtcgggttgcggggcctccaggagctctgtgagcccgtgctcaggtgcacacaacagaagtactccgctgacgcccacccctttcactcagctctcggttcagtcatcgccaagcaactgagagcctttgtgaagaggcttcctgccctcttcatcttccacagacacgctcttcttccttaagcccaggcatacacagacacagtgaatgcacacacaaagacacacaccagtgtgcacactgctctggaatccacaggttctataaatatctagaaatgatatctgaaagtgcattgttatatgcgctggtctgtgatggttacggtgatggtgattcctccttccggaggatggcgcggctgcagccagagggagattaggtggcggaggcttcgatgaccatttacattttacgagtacttattttgagtgtgtatttggaaaaattaaatttgtatatcaagcccatgatttcacagatatttttgcttaggtcaaaggctaaaacaggtatttaaatcaattcgtttatttaacttaaagaaaaatatgacgggttaaggttgggcttccccagaagtagatcccgaagcaggaatgggaggtgtcccagcgtggcggcgagttacttcaaactgggtggctttaagtaacgaggattcattccatctccgttctggagctggacatctgaaagcaagctctgggcagggctggctcctgtggaggctctgggagggggtgtggtttcttcctggtcccttccagcttctggtggctccaggccttccttggtgtccccggcttgcagccgcatcactccaatctctgcctctgttttccgtggcgtttttctccaaatctacctgtctcagcttctccatctcttatgagggcacccttcatgggatttgaggcccactctaatccatgatccttaccctaattacatctgcaaagaccttattccaaataaggccacattctgtggttatgggtggacatatttgggggccctgttcatcctacttaaggagggaaagttgtttattttggaggtgactctgagagcacagcagcaggtgagtgggaggtgagatgcccagtgaccagggcggccatcaggcaggccacggccaggcttctgggctcagcctcaccaggtcctcagctgcccagggctttctcacccaggacctgcctggagactgctccggggccatcaagtccccggcatgtcagcccaccctggccagaaacagcctggtcaaggggcacagggctgtggagttggggtgcccaggaaggggagaaccagcggggtccatgggccaggagagtccagccttgaagatgggggtgtgaaccacacagtcacggtctcaaaggcacagagctttgaaagcaaggtagtagctcctcaagccctctgggcacgccccaccagggtttgtgtgtggagttaatagggggcagttccaggagcacaccagaggggccggggcagccggaggggccagggcagtggagggctgggcagctggggcccaaccccagtggggactgagaggcctcgtgactgctgcctcagatccacctctgaagggcgggaagcctgggctctccctgtcccccacaaaccagggctggggtgtagctggggggtgtggagtgaggctggtgagaggtgcccgacgggagaagggccccggtccagcagctttccctgatcaaccaagggggatctattttgtttgtaaaaagctgattatcatagataaatgtgtctaattagtctcatttgctgacacacaagcctttaattgcaagttgaataattagacatatctgcatatgtaaatgatacagttataccctatgtcagtctttaacgtgattcctccagagacaaataattctatttcaggagagaatatgatatattaatttacatagacaaacaactttatttagaaccagcaactctcgtgtttgtttacataaagtaataactcgagaaatgggaaagatcgatgttgcagcaacatctggaggctcctaacctgcaggggagtccctggcagcctcccacgggagctgggtcttcctccgccctcctggggccccagtcctcccacgtggacagcagctctgggcctgggggtgggctggggcccaggccatggggtctccctcccctcttccccctccaccctccctcatgccatgcttcctcctctgccccttgtcctcgctgggtggcaggatgggtgagatgcccggtggccctgcaggcctgcagctggcccagtgcatgtgggtgtcccctctccatggctgtgccctgcatgctggcagagctgccaggggcagcttggagcaggagcagctggagcttgggtcctgattcaggcagtgctacagccggctccctgccaggccctgggtcagctgcccacctccccagtgggtgtcatgctcagcagcctcaggacagggctggggggctggctggtgccgcctgcctctgtcaggcccccggcctccactctggctgagtacatcgtctcctctctgagctgggcagggcagccactggcgacccctggcatcctccgggtctgactggcggggacagggctgcgaaagcatttggaggcctgacctggaaggaggaatgaggggccagctgagggcgtcccaggcagagccaggcttgcgatgcccagggtgcccggggcacagagtggcccggccgctcccacaccccttcccccttccctgggcccgtggtcacatgggtttcgctgggaggcagagcgtgaggaatttggctctggtggaatgaggacggctgcactccctgctttgcagagggcccgcacagcagcccgtcactgtggcaaccggctccgtgatgctggcaggagctgacatcgtcccaattcgcccctgtggtcccttttggtccccctcccctcgaccgccaggagccgctgtggatcgagttggccagcagagggcagcagagggctggcggggctggcggggctggcggggctggcggggctggcagtggacgccacactttggggtctccaggcccccaagtcttctggggaaagcagcagacaggcgacagccacagggatggggaggcgccatcactactgcaaccactgggggtagcccttggcccgtctgggggcatttcatctttggcagagctgaggggtccagcacgtgggcctctaaggaggggtctcccgcccaccgcccccagtgctactgtgaccgcggcggctcggccccgcctgcactcccaggttctcactcatgcagtcactcactcattcgctcgctcattcactcgctcattcactcattcattcactcgctcattcactcattcactcattcacacacactcatttgttcactcattccttcactcaatcatttacacactcatttgttcactcattcattcacatacttatttgttcacttattcattccttcattcactcattcattcacacatactcatttgttcactcatttccttattcactcattcacacatgcactcatttgttcactccttttttcattcattcattcacacacactcatttgttcactcattcattcacttattcacatacactcacgcatttgttcagtcactcattccttcattcactcactcattcacacacactcatttgttcactcacccattcacacacactcatttgtacactcacacacaatcatttgtttactcactcattcacattcactcattcatgcacacacttactgattcatgcacacacttatttgttcactcactcttgttcactcattcatttctttcactcattcactcacacacattcactcattcatggacacactgattcatacacacagttgttcactcactcattgcttcattcactcgttcactcacattcattcacacattcatttgatcagtcattcattcatgcaatcatttgttcactcattccttcactcattcattcacacactcatttgttcactcctttcttcactcattcattcacacactcatttgttcactcattccttcactcaatcattcacacactcatttgttcactcactcattccttcattcactcattcacacactcatttgttcactcgctaattcaatcattcattcacacacactcatttgtttactcactcatttgttcacccactcattcctttagtcactcattcattcacacactcacttgtttgctcactcattccttcacacacatgcactcacttgttcactcactcatccacacacattcattaatttatttacacacactcactcactcatttgtttactcagtcactcctttgtacacagggaaagagtaaggtacctttccctcctgttcagctgctgccagaagcagtgtccagttctcctggtctaagcaggactcaaggtcctgcagcagctcagcagcccctggagctgcagcgtctcctttgttctctctgaagggggcatgccttggccccaacattcttgtccttcattttttgaagtttcttccccctctctcctggctaatctcatatcttaactaccaatataagacaaaatatttctgtgactttctttccaattcaataaatccatctggtgagaagagaaaaaaatgcaagaagagaagaggcaatgccgcaccccaaaccctgtcagtcactcacactgaggacattttcacgaggcgttaatgggtgatgtttgaattctggttgccagcacagatcagggcaaagctcttgtaaaactctattaaagtctgtggatccagctgagacacagggctgggaaacaaagttaactgttctccctcctgagcggcttgtggttcaggaaacacccccaagcccctgccttgggggatctgtgggtgagagggaagcatatttggatacagcttcaagagagaggtccgactgctctgtgtgtacacgtgtgtgtggattgccctgtgtgcaccagctctgtgagtgcctgcatgggagtgtgtacacacctgtgctctgtgtgcatcctcaaacacaccacaccaacaggggtctggcattgcctccctacggtgctcatggtgaagtcctcggactccaagcccctcttctgcgccagcagtgaccaggctgtggtcagcatggcctgttggtggcctttgacttcctctgttggcagatggcttgaggccccccagttcagggccacaggtgacttccccctttcccaggtggtggggccctgtaggcttgaccagccccaggctccagagcgcacagaggtggctgtccacagagcgcgggaggcatgggagggtgtgctgctgcctgctggtcatccagctcctcgcccattaaggagcccgctttcccctttgggaggccacaggggctggcgaaggcccttcagctgtggctcaggtgggctgggcaccactgcaggagaagcctcctccagatgggaggaggtaggaggtgcctcctccagatgggaggaggtaggaggtgcctcctccaggatcaaccccagctccttagcaccagcgaacagacacagtagacacacgcaggaacaagcacatgtcccaggctgcaccgtctgtgtctttccctttttggggtccttgcatttcacccttacctggttctggattcagcttttaagggcacactgattggcagccaggccactgtgagcgctggctccaaatgtccttttgttttgttttgttttgttttgttttttgagatggaatctctgtctgtcatccagcctggagtgcagtggtatgatcttcgctcacctcaacctccgtctcccggtttgagtaattctcgtgccttagcctccccagtagctgggattacaggtgtgcaccaccatgcccagctagtttttttgtatttctagtagagacgggttttcaccatgttggccaggctgctctggaactcttggcctcaagtgatctgcccacctcaatctcccacagtgctgggattataggtgtgagccactgcgcccggcttccaaatgtccttgacaacggccacagcatagcctgcagccaaggggcgagggctgatcgcgagggcctgtggtcattcctccaccttcggtgccctgcctgggcacccccgtgcagctaccacgtggggaaggcacttggcctcttccctcatctgcagactcagccaacttctggggctccctcggcagttggggctaactcagtgggtcaggtggaccccggctgtgcgtgcagcccccgagagggtcagcaggggcgcggaggcccccttggctctgctttgttctgcctgcggctccggttggtttgtgatatctttgattccatctcttgcccccatgtgaccccatcgtctgcctggccgggggctcccttgttggagtgtggggcgagcccccacccgtgtgggaagaggagaaggccaggctctaagccccactcagctcctcgtcctcggaggggtcctggccctaagagggcttgttggggtcacgcaagctcacaatggctgtggtcctcagcaggtgggacaatcgggctgttttccgatggtgtttggcagaaagtgggagtcaaagcttagaaaagccctgacagaaatggttccctgaggctggcgggagagtggcactcgggatattaaaacagcgaagtcggtcctggccaattatcagccagctggccttgctccggcgcccagagctcacagggtgagtcaccatctgcggctgagcatccctgttcagtgagggagacagatcctgtcctggtccctcctcccagctgtttgtggcctccctcctcaggctgcctgggaagctgtttcagaaccttccagtcccctcctggctggccctggggctctgtggaagtcctgcttcccccagcagtgcctggccctttgtccccgacccaggaaaaggtgaagtgggggtacttcctgtgcatgacacgcccccttcccttctcccagcctcctgcctcggggctctggcaagaaagagggcctgagctgcaggagaagggcttccttgagcaggaagaagccctggcccagggcagggtgcccggaaggcggaaggatcccagcccaagccacagccccaccagatgggtgggggccttcatcacaagaaagatcagagagttgccctctgaagccttcgcagtggccctgacacaggctgccagggatccgtcactcaagggaaggccctgggggtggggggctctggcaggggtgaccacagtggttaggggcctgggtgagaaaagggacccctgatgtcccatcagggccgggaggggaactggaggacctcctggcactccctggcccctcctctggtgcctagcaccttccagtgcttttcccaagaggaagggagagcctggtttcattactaagccctccatgtcctgtccgtgtccgtgtcctgtttgtgtctgcgtcctgtctgtgtccatgtcctgtctgtgtccgtgtcctgtccgtgtcctgtctgtgtcctgtccgtgtcctgtccatgtccacgtcctgtctgtgtcctctccgtgtccgtgtcctgtccgtgtctgtgtccatgtcctattcatgtccgtgtcctgtccgtgtcctgcctgtgtccgtgtctgtgtcctgtccgtgtcctgtctgtgtccgtgtcctgtccatatctgtgtccgtgtcctgtccatatctgtgtccgtgtccgagtccgtgtctgtgtctgtgtccatgtccatgtcctgtgtccgcgtctgtgtctgtgtccatgtccatgtcctgtctgtgtccatgtctatgtcctgtccgtgtcctgtcagtgtcctgtctatgtcttgtccataacctgtctgtgtccgtgtcctgtccatgtctgtgtcctgtctgtgtcctgtctgtgtccgtgtcctgtccatgtccatgtcctgtccgtgtctatgtcttgtctgtgtccatgtcctgtccatgtctgtgtccgagtcctgtccatgtccatgtccatgtcctgtccgtgtctgtgtccatgtccgtgtcctgtccgtgtctgtgtctgtgtcttgtccatgtccgtgtcctgtccatgtcctgtctgtgtccgtgtcctgtccatgtccgtgtcctgtccgtgtccgtgtccatgtccatgtcctgtccatgtccgtgtcctgtccgtgtctgtgtccatgtccgtgtcctgtccatgtccgtgtcctgtttgtgtcctgtctgtgtccgtgtcctgtttgtgtcctgtctgtgttcgtgtcctgtccatgtccatgtcctgtccgtgtctgtgtccatgtccttgtcctgtccatgtctgtgtcctgtccatgtctgtgtcctgtctgtgttcgtgtcctgtccatgtccgtgtcctgtgttcgtgtcctgtccatgtccgtgtcctgtctgtgttcgtgtcctgtccatgtccgtgtcctgtctgtgtccatgtcctgtctatgtccgtgtcctgtccgtgttcttcttcaccctgatgtgggggagctctttcggcctttcctttactgcagcccgaaaaggaaaaaagagggaaaagcaggcacatttcttgaccagaaaaaataaacaaaaacaaaagccccttgtgctccatgggggagagcgtgaagcccccgagcgccactgcccccggtcccaggaggctcaaagtcctctctgctcagagagccgggggtgcttggccccaccctgtcccccttcccagccacttggtatttacatgtacagctggaccccgagagaatccccattctaagcccaacagtacattctggggcgttttaaagaagataagaaagtagctcagaggtttgccaggctgcctcattcctgggatttttagtgtgagccttggagctggtgggcttgaatgtggggttcctgcagttgggtccccctgacgcccccggcccttccctgtcactccggggtgtaattaggagtgtcccccaggattgagggagtgtggtctcgagctggttggactcaaggctgttctacttttttctccaagttttgtttattgtggtaaaacacacataaaattttatcatctcagccatttttaatgaacagttcaatgacactaaggacattcccatggttgtgccatcaccactgtccatctccagaacgcctttcaccttcccaaacccaggctctgtccccattaaacagctccccacgcctcctcccccagcccccggcctcccctttctactttctgtctctacaaatgtggcagctctgggaccgcgtgtgagtggacacctacagtattgtcctctgcgactggctgatttcattagcatgtcctcaagcttcatccacgttgtagcctccgtcacaatttccctcctttttaaaggctgaataatattccattgtgtggatagacacattctgtctattcattcatctctcaatggatacggttgcttccatgttttagctattatgaacaatgctgctgcaaacatgggtataaagtgtctctttgagatcctgctttcagttcttttgcgggtgcactcagccgtggaatggccggatcacatggtcattctgagttttgttttgttttgttttgtttttttgtttttgttttttttgagacagagtcttgctctgtcacccaggctggagtgcagtggcgcgatctcggctcactgcaacctccgtctgttgggttcaagtgattcttctctgtcagcctccccaatagctgggattacaggtgccggccaccacacctggctaatttttgtatttttagtagagacggggtttcaccatgttggctgggctggtctcgtactcttgaccttgggatccgcctgccttggcctcccaaagtgctgggattacaggcatgagccactgtgtccggcccattctgagttttttgagggagtgccatcctgttttccacagtggaggcaccattttacatcccccaccagccgtgcacgagggttccagtttctccacatcctcaccaacatttcttattttcagcttcttcttacggtagccatcccagcgggtgtgaggcgcatcgcactgtggttctgatttgcgttttcctcatggttagcgatgttgtttcacgtgcctattggccgtgtgtgtgtctttttggagaaacacttagccatgccctccatgcatttttgagttgggatttttgctcttattgagttttaggagttctctgtacattttggatgttcattccttatcagatatatgatttgcgaatattttctcctgttttctgggttgcctttgattctgctgagattgtctgttaaggtgaataatttaaagttttcctgaagtccagtgtgtctgttttttcttttattgcctgtgcctctggtgtcatatccagggaaccgttgtccaatccagggtcatgaagctttgtgaggctgttctactttatttccagggagctgcacaacctggggtcttctctggggccgtgggctctgagggccgaaggccacgttccccgggtgttggtgtggacctcggcacggcccccactgacctgcatgggccgaggtcctgcaagagaacgggctccatttgcgtctgagggccaggatgcctgcactggggatcacgctgtgcttcggatggagcctccaatctcggggatgccattttaccctggaggccatcgggcttcatgccccacgggcattgtatcggcttccgtgtggccccgagagcagggcaatccgagggcaaggccaagggagtggtgagcgtggcctgcagggcggagccaggcgaagtggggtggggctggaggccgcccgggctctggttggtgggcagaggcaggaagccactggtagctcagcacagcacagggctgatgtcaggggcggcacccagccaagacccagggagctgggtgctttcagcttctctttgccagtcagctgctatgagggcctaagcagtccccatggcttcctgctgagacacctaggtcccccatgacttcctgctgggacagagaccccctctgagaggcagatgccaaccctgagcaggcccccgaggttccctcccattctcctggtaccagggctgggagggcagggttccggcctgtggcactcaggctggtgatgtcagaatacgctgcgggtgccctggactcctgctccggttccctgaggggtcatgaccttgagtactcatgagagacagcttctcacactcacttccgcgtgccttccccaaacgcggagctgcctcctggtgcagcctgaggcattttctcatggtctgtccagaacagtttctgggtcagattcagttttcagaagcagaagccacagcattcgtcctctgctccgtccacacgcggcacccaccccaaggaggcggcacagcctggcgccagccacagggctcagcagagagaggggaattaaacagccactggctgggaaaggacgtttcaagggcgtaccacgcggccaattcaatggaaaaccaaactgcaagcgggaatgtgcatcagaaccagcccggagccagcaggcgttgctggagcagggtggtgggaggtggcgttccaggcctggttgcactccggtttgtccttcaggtgcgtgaggccgcctctgccatggctctaggcacgtccctgccagtgggggctccagcataatccctcgtcctgcagacacagcaccccccaccccccgcaggaagtgctgcatccggctgcctgggccgtggtgcccctggggtcagggacgtggcaggtgcggaggccgtgctcggtgccaggctctgagaggtgacattgcctcacctgggtcgagctccagccaccgaggacgatggaatgactggggtgtcttccgggagccgtttgattgtctctggagaatcagccgaggctggtgccgccttggagcaaaaacaggggaaatgagactccacaccttctgccaagactttaattctcttccaagcttcagaactgaaataattttagaagtcattgttcatcagctggctctgttttccacagcttaaaaatgtcctgaatggttgtggagtcagggtgctaaaataacaacgcaaaccgggaggaggccgggatgcagacagaaagagaggacccggcctgaaccaagcactggccacggaggctcgtggcagcgctgaggggaggacggtagcctcctgcctgtggctgccggggctcacatctgagcgccactggcttaccaggactccgactgggcttgccaggcagcggcccttgggaaccggggacgtccaggcagccaaggccttgctctcagccatgcatgccactggccttcaacaggctttccttaggtcggcattttaaacaaaccccagggtgggtcctggtgaggatgctctgttctctgtgctgtcctctaactgcagggacgctgggtccgcagcttccatgggctgggcggctctggtttgggccggggtggatcctggctgtgcattcgtggacatcagcttctctagggtttgggatgggggatggtttatctcaaacccccaacccctcactggacctcaggcctgctgcaaagcagaggctagggttggctttaactcgctgccccatgcaggctgcggacactccaggagatgctctgttttcccgcccagcagtcaccatcacggagatggaggcctgaggtgcggtcttttccccctgcttctcttcctcttgtgggaatcactgcaaatgagaccacagcagcctgggccttgccagcagcaaatgctcagtggtagagccaggcggccctcttctcctgaaagccttgtcctgggtcaggcccgggaagaaaggatggggacaggaaaggacgaggctgcggctgccgtcccccagggcagccacgcctgggcagcccccggacagagcctgtttcagccctcagacttcacggggcaagatcacagccctctcacctggcttcatatggcagtgccacagaggcccctccctgactgctccaggctctccctgacccctccctgacctctctagggatctcgtggggacccacaggccatacgacattctgagggcctggaacggtgacttccctgacacttttctgttattttaagtaaaataatacatgctcaccaccaaggccatttctggttgaatttttttggctcagattagataatgctaaattttatgctaatttaaagtgtcaaacaagaggccaagccgcggttctccgtggtcccctgctgcaccaggttatgtaaccgtgtttctcctgctcgtttgcctggcgccgcccaggcccgtgtcttttctattttgggtgtagacggaggtccttctgtctgagctttggagcacaagggtctgggcgtccttcagttaggggaagggctttgatccctgagtgcctgcgaccttgtggggacagcgtgatcatgaaatatggaattcaaaggttcccaggtttgagatgttgacacgtgagtactttgccttcaccagtcctggaaagacctggtgggggaagaggacaatgacaaagttgctgtgtggatgggcggcgcgtgcagaaggcagggcctcgggctgcagggggatgtgcccctgtctgcctcctgcctcgagtggtcaggccggtgctgggacatacccacttgccccaccccaacccggaaggacagtccttgtgccgggcccttcccacgggagcatctgtgggatgcagagcctgccagcaccggcatgtccacctggggccactcagcgttttgtttttgatgtcaaggtgaatgcccctgtgtaggttcagcaaaatgaaggactgtatattaagtgtgttacacacacatgaatgaatgcctggacttgtagaatgaggaaactcaccaagcacctacaaggacctggagaaagagagaaagaggtgggagggaggaggggtgggccgagacctcagcccgtggagctcatggtgggtgaggggaggagagatgcttaggagaacaaaagccagcctggctggtggtgaggtcacggccaggggagcacccagtagaaggggacagcagctataaacactgaggaccaggaagggctccctgcaaaggggcagtgtggccaggactggagggaggcaggggcgtcgagacccgcgggggcgtcgagacccccgtgtgcctgagcacggcctatgcctgccctgtggctacgatgagaaacatcccacgtgggctgccagtggacgaattgccagcacctgccatctcctgacatcactctccttcgaggctcactcttcttcactcagagttgctcacggattcgcctgttccctcattcactcattggttcagccaccaaattactcattcattcattcattcactcacttattcatgcgttgaacacctggctgacgttttggggagcagggttgggatgtgcagcaccccacagcgctttgtggagctctgatggcctcacactccttgaccaccaagcaccagcccctgggccgcgagccagccaggctgttgccgtgtgtgagacccagaggcagaggtgggagctgggccccacgctgaattcatgggcttttgtctgcctctgcccacctgtgtctgtttattcacccgtcccctccctgcaccccagtccccacccccacagcagcaaaggcagccccagtattgacacccagcagtggggcctgcaccccagtccgcacccccacagcagcaaaggcagccccagcattgacacccagcagtggggcctgcaccccagtccccacccccacagcagcaaaggcagccccggcattgacacccagcagtggggcctgcaccccagtccccacccccacagcagcaaaggcagccccggcattgacacccagcagtggggcctgcaccccagtccccacccccacagcagcaaagtcagccccagcattgacacccagcagtgggggccgaacagaccccagacaaggaggggccaccaggaagcctctgccaacaacagccccactaggcctcccgcttcctgtctgccctgccagccctggtcaggatagcattgagggtgagggcatcgggggccatggccaggatgggaggaggcagcgctgccacccaccacccccggctctggggagctggactcggtgcccatcccactgaaaccatctgctgtcctggagcccagagatgcccgggcctgccgaggtgggcagcaagaaggtgcgatgaggtgtttctacagaaatagcaggctggccatcccacagacagcacaaggaccttccccctttcctcccagagaggaatctgcatgtctcctccctcccagagaaaacaggagctccttgtccaagtcattcagggattttccaagggagagggagtttttttattgtttgtttgtttgttttcagagtcttgctgtgtcactgaggctggagtggagtgcaacggcatgatcttggctcactgcaacctctgcctccctggttcaagtgatttttctgctcagcctcctgagtagctgggattacaggtgcacaccaccacgcccagctaatttttgtatttttagtagagatagggttttgccatattggccaatctggtctcgaactcctgacctcaggtgatcagcttgccttggcctcccaaagtgctgggattacaggcgtgagccaccgtgcctggccgggagggagtttttaaagaggtcagacctcttcctgattttggggtgcagagccagcaccatccaaggagatgctgcggggttgggagggaggaccgggtccatgctccccagtggaggtgccggctctgggagacacagggcccctcgccctgcatgcatgcacatgcggcttctcagggcagctggacttgctctgttcatgagctcttggccttctgaaactgctagttagaggccagttagaatgcttggcctagagaggcccctgttcccccatcggagctgagctgccatctctcatcagaggctcgtgtcagaaagccctggtggaggaaagccaacacttgggaagcacagggaggcaggctggacccggcgtccttgcgggctgttggcaacaccgtctggagagggaccgggccctgtgcccgccagtccccagggcggggcggcctgagctggcctggtctgctgtccttgggatcaggccaggactcagctctgtgcctgggggccctctccaaggtgctgacgacaccatgttccagccttcactcctgccagcctgggagaccttcgagcggctttaacaaaccccatcgcaactgggcttgccttgaacacagccctggacaatggctctgtctgggtgtctttgggaatacacgtctttttactaacttcagtcagaccttcagccttccttgatccagcctctctgttcttcccctgctcctcctccccaccccaccctccctcccacagcaattccccaaaggagcagaggcagagggagagccttcctctgcttgtcccttgagaagaggatgtggaaacgtcagagattctcctgagagttgcaggcaggcagggaggacagacgtacttgggacacttcctgctgtgattccaaactctgctgacccaaggaggaggtctgcatgccctgcgctgttgactgtgtgacactgtgtttatgctgaaatatggagtcccaggaggctgggccatttccctctgtttcttttcttttctttttctttctttctttctttttttttttttttaacacagggtctcactatattgcccaggctggtcttgaactcccgggctcaagtgatcctcctgcctcggcctcccacagtgttggattacacgtgtcagccaatacgcctggcccctatttcctttcccacttaatgaaacaaaatatttagctggataacaattatttcactttctgaagtcaacacgagtctatttgcaaatacctagaattcattctagtagcaggaggcaaaactacgagcctgtgttggtcagcgtggctctgctgctcggcttttcatgccacattagatgggcatctgcccagtactgtgtccccctttgcccagcattcagcccttgtcattgagaggggacagatgcaggtggaggatgagagcaggctgccagagctgagtgtgggcaggggtggaggcaacctgaagtagacactctgctgggtgctcaagctgccaaaccctgctggtaaaacagagatgcctaaaggatttggagccagacagggaggctgagtggggggaaacagcccagcatggtgggctaggtcatgggccctggacaactcgtgtctggtggagtgctgactctgcagtgagggtgtgaccttggggagctgagaagattgaagagctcatttttgaaccctcattcctttcttggtttcctcatctgtaaaggggtcatgttactagggtctcatgtaaactctggccccttggtcagcactcagcttcacaggtgttgcctcggtccccagctctcaggtgcccgggctggtgagagggcactgcgccaggcgcagcagctctgcaaaggtggtgacccaggacacctacccttctctgcagctcagcccgtgaatttgcaccacaaatttcaatgaagtcatcttaagaagatctcactttgttccttcttccagaggcgggtgggtgggaggcccagctcccctttcagagaggaccttcctcacatgctaccctgtccagccccacgccgttttcggtgacaggggcctggacagatccctggttcagagcccaccccactggaagtacaggagactgagtcagaggccagtcaggccggatgagatcaacagtgatttgcctccaagccctgattcctccctgaggaatgctcctgagaaaacgctggctcccactcacagctggagcttcaaaggttggtctagcactgaccgtgtggacccacgtgcttctgtctggaaaagccccacaagccccgccccataagaccccgcccctcttagctccgcccacaaggccacttcccagctccgcccatctcgcgtctgtaccctacaggctctgcctggttccaccccaccgcttctgccacccactctaaggacccgctcctccccgcccccgcccccaaagccgctcctctcacggcccccgaccccgcaggcaccgactgttctcagccccgcccctcgaggccccgccccgcggcttcccgccggggattgcggctgcgcctctgaccctccgctccgggctccgggctcaggtcccacacctgcccgcgcccccaggccccgccgtcccccagagcctgcagcgggcgccgcgcaggccgccgggctcctccgggtgggccgggctcgggcttttggagccgcgcgcccaccgacccctcccacgggcggcggggggagagcccacccagaggcgcagcggggccggtggtgtttcccgccctcccagggggccgcgggtccgggggcagcagcggggcgcggggcggagggaggcccggcgggaacgggcgccccctttgcacccacagccgtggaacgccgaggtctcagctcccctacggcgcgcgccccgagaccccgcaagggcagtgctggggacgcggggccgagactcgaggacgcccgaggccgggacggggtgtgggggcgtcccccaggctcccgggtcccagtgcaggggctcgcggtcaggaggttaggtggatgagtgaaggggaaaagcgcggttctagctgcctgctcaggcttggggcgatgtgaacgtcggggtttgcccctcgaccccccaccagaacgcagatacttctcagcaaagaggagcttggggcagcccactccccacagaggaagggaggggcccgctccacggaggacctggggggctggaggaacaggcacccccatgccaggcaggacccgagggatcggtacagggcacggggagaggggcctgggggaagctgttgaccccgtgatcctttttacaaacttgtaaatcagagagaaattaattcagatgctgcaattttttctgataaacctcgaaacatgtaaatatcaaaccctcttccttcagtcactaaaacaaatggaaaacacatttattagcatagagatgagtttaatcaaatcagcctgagtgcaaattagccacaggaaatgcaatgagctgggaattaattagcagcgtaatgatgataaggtggcctgctgactgcctggaggccgcctctccccacggttgccgggctcctggcagctcagcttttcctttgcaagaggccctgagcggggaccactggacagccccctggaccccttggagagctgcagaggagaggcttcagggggatgcctcccttggggggcaggtctgtgtgttctaggggagcccagcctaccctcccccggggtgctcgtggcttcctctctaggaggccagggatggggaatgaggccttgggatggtttgaggccttcgggagcccaggagagggcctggccccagggcagtccggcccagagggggctgcctgctctgaaggaggggcttcccaatgtagaggtcccagtggccctgggtcccagctgggggtggactttggtgacaggcagcccccacctgaactggaggagcctcatcgagggtcctaaatgatactacagatgagacgtgcatttcaaatctgagggcaaggctgggaccctgggccctggcacgtgggactctggaatccacctgagtgcccattcctgcaggaattcctgagattgcttggcaccttgcgggttgtggctggtactgaggtgagcggttgaaatgtcccccaggactggtcagctgccctcccagttgggctgggtgcccaagtgttcacagggctcttgggaggacctgggtggccttgtgcaccctgggggctgttggtctaagggtgcaggggctccctggaggtcgggagctctccctggggccagctgcagccctgcgatgtgccctcccctccctgcacaggctggacacacagggacacttcttccccggaggcttctccagtccccaggaatctgtcccccacctgtcatcaggaaacttcagaagatcaggaatttttttctggagctgcattttgcacagtttcctctttttaagggaggaggctcggagtctccggtcaccacagccgatttccctgaagcctccgcagggggccacccccacagagttttatatgctaacagttcttaaattcggagtcctgtgggaaggtgggaaagttaggtatatacactttttaatgtttttgtttttgtttttttgttctactcaaaaagtcattggtacctaggtaacacacttaaagaaaggcacactttgtggctgggcacagtggcttacacctgcaatcccggcattaggggaggccgaggcgggccagtctcgcttgagcccaggaatttgagaccagactgagtaacatagtgagaccgcatctctactaagaaaaaaaaggttagccaggcgtggtggtgcgcacctgtggacccagccacttgggaggctcaggtgggaggatcacttgtacccaggtggttgaggctgcagtgagccgtgatcaggccactgatctccagcctgggtgacagagtgagaccccgtctcaaaataataacaataaaataaaggcacattttgagaacagaagatgtttctgagtttcacatgttgccatatcctgtggacagcttatagtgggacaccagggcagatattgaagtttgatgtaacttgtgaatggcttaaaaagtggtaatttcttgggatcagaaagctgattaaggcaaggctgagaggagtcagcttgcctctcttccacagcgtccactgggacagttcaaccctatctgcgggaccaatctccaagacgtgagttggcacagccatcagttcgtctccatggatgtctccacgggcaacctgagctcccacgtggcatggtgatggttctgaaagtgggtgttccaggagacaggaagtgccagttccttaaggcctgggcctgtggtaaaatatgcataacacgatttaccttattagccattttaagtggtattgagtctgttcataatgttgtgcggtcatcacgactgtccacctccagaactctcttcatcttgtaaaactgaaactctgtccgaattaaacaactcccatcccccctccctcaagcctcagcacccaccgttctactttctgtctatgaatttgactaagtacctcacaccagtggaatcgtatagtattcgcctttttgcgactgtcttatttcactttgtatcaagtcctcaaatttcatccacgttgtagcatgggtaaatttccttcctttttaaaggcggaataatattccattgcgtggatagaccatattttgtatagtcgttcatccttcaatggatatggggttcatattagctgttatgaacagtgctgctatgaacatgggttcacagcatgcacatctgctataggttatctttgagaccctgctttcaattcttttgggggtgcactcagaagtggaatggctggatcacgtggtcattctatttggagttttttgagggagtgccatcctgttttccacagtggtggcaccattttacacccccaccagccatgcacgagggttcgtttctccacatcctcaccaacatttgttattttcggttttttctcacagtagccatcccagtgggtgtgaggcgcatcgcactgtggttctgatttgcattttcctcgtggttagcgatgtttcatgtgcttattggccatgtgtatgtgttctttgtagaaatgtttatccaagtcctttgcccatttctgagttaggttttttgttgttgttgagttttagaagtcctctgtatattatggatattaatccctaatcagatatatgatttgcaaatattttctcccattttctgggttgccttttttccctgttaatattgtcttttggctgggcatattaactctgcctgtaatcccagcactttgggaggccaaggcaggaggatcacttgagggtcaacaacctgggcaacatagtgagaccctgtctctacaaaaacataaaataaaaaacagcctggcacagtgctccatgcctgtagtcctagcttcttggggggctgaggcgtgaggatcacttgagcctaggagttcaaggttgcagtgagctgtaattgtgccactgcactccagcctgggcaacagagcgagaccctggctcttaaaaaaaatagtcttttggtacaaaaatatttattttttacgaagtccaatttgtctgtttttttcttttgttgcctgtgcctttgatgttgtatccaaggaatcattgccacatctaatatcatgaagctcttgccctgtgtttgtcgtagttcatttgtgtggctataaaggaatacctgaggctgggtcacttatagagaagagaggtctgtttggctcatggttctgcaagctgcacaggaagcatggcaccagcatctgcttctggcaagggcctcaggaagcttccgctcatggtgaaaggtgaaggggaagcaagggagctagtgcacagagatcagacagcgagagcatggggagcaagagaggggagcaggttcttttcaacaatcagttcttgtgggaactaagagtgagaactcactcccccgagaatagcaccaaactgttcatgaatgatccgccccacaacccaaataccttcaaccaggccccacctccgacactggggatcagatccccacaggaggcttggcagggccaaaccaaccaaatccaaccacagcagttttcttctaaaagtttgtttatgttgaacatttaggcctttgatccattttagttagtttttgtatatcttgttgggtaagggtccaacatcattcttttgcatgtggatgtccagttttcttagaaacacttgttgaaaggactgtcctttccccatcaaatggtcttggcaccattgtaaaaaaatcatttaaccatgtatgtgagtgtttatttctgggctctccattctattttatttggtctatatgtctgattttatgtcagtaccatattactttgattacagtagctttgtagcaagttttgaaatcaggaagtgtgagttctccagctctgttttttttttctttttcaaagttgcttcggttattcagtgttccttgagattccatagaaattttaggatgggtttttctatttctgcaaaatacgtcactgagattttgatagggattacattaaatctgtatattgctttggatagtattgccattctcacaatattaagtcaatacatgaacatgggatgtctttccatttatttatctcttctttaatttctttcagcaatattttgtagtttttattgtatgtctttcatctcataggttaggttaattcttagtattttattcttttttatgctattatatgtggaattgttttcttaatttccttttcagattgcttgttagtgtatagaaatacaactgatttttatctgttgactttccatcttcttactttgctgaattcatttattagttcctgcagtttttgtgtgtgtcatatttagtgtattttacatctgcaaacagagactttttttaagttctttctttctaatttggatgtcatttatttttcttgtctaatcactggataaaacatccagtactatctcaaatagaagtagtgaaagcaggcatccttcccttcttcctgatattagacaaaaagctttcagtatttcaccactgaatatgatgttctttgtgggtttctgatacatgtatttcattatgttgacatagtttcatagtttgttgaatggtttttatcatgaaaggatattggcttttgtcaaatgcttcttctgcatcaattaagatgatcatgtggtttttttccttcattctgttaatgtgtattacattgattgattttcatatgttgaaccatccttgcattccaggaataaatcccacttggtcctggggcataatccttttaatatactgctgaatttgatttgctagtattttattgaggatttttgcatcagtgtttattaaaaatattggtctgtatttcataccattgtggtcagagaagttattttgtatgatatctatctttttaagatctattgaaatttaatttgtaaactaacatagtctatcttagaaattgtttcatgtgcacttaaggatgtgtaagctgttgctgttgggtagaatgttctgtatatgtctgttatatcttgtgggtttattgtgttgtttaactcttctgtttccttatttatcttttgtatgattattctatctattatagagagaggatattgaggtctctaactgttactgtattaatagaactgtctatttcttccttcaactctgtcagttttttgcttcatacattttgattatctgttgttaggtgtataaatgtttataatcattatatcttcttgctgtgttgaaccttctattaatatatgatgcccttgtctttgctcttctttgtctctttttaaattgtaaactctattttgtctgatattactatagctacccctactctgtttggttgctatttgcatggaatatcttttccatctttttactttcaatctatttgtgtctttggatctagagtgagtcttttgaagatagcatatagttggatcatatgtttttattcattctttcaatctgtgtcttttgactggagtcaaacccatttatacttaaagtaattactgatgaggaaggactggcttctgtcattttgctatgttttctatatgccttagagtttttgtcctgcatttcctacattagtgtcttttgtgtttagttcatattttagtgaaatgtttaaatttctcatttctttttgtatacagtctatagctattttccttgtggttaccatggcattacatttagcatattaaatttctaatttggattcatagcaccttaactttgataacatacacaaactctgcttctttatagctctgtccctacccttttcagttattaatgtcacaaaattaaatctaaactaataattcttttaagtgcattagtctcaaattatgtagaaaacaaaatgtggaattacaaaccaaatttacagtagtgctagttttgactaataactttttaaaaaagtattagtatcttaaatcatataggaaacaaaattgcagttacaaaccactgtggcaataatgctaacttttataattggccatgtatttgtttttattgagacctttatttcttcatacagcttctagttactgtctagtgtcctttatttcatcttgcaggactccctttagcatttcttacatggaaggtctagtgataacaaactccctcagcttttgtttatctgggaatgtcttagtttctccctcactcttgaaagacagttttgacagatataggattcttgtttgtttgttttaaattttattttagcacttggaatatattggcccactgtcatctggcctccaaagtgtctgatgaaaaactggcttgcaatctaatagaggatcctttgtatgtgacaaatttcttctctcttggtgctttcaagattccagagtcctcctggaggtggagtgtggagggcacatgtgggtgcacacagtgggccacccagacccctctcagcacaggggtttgctagcagctcacagctgagtctctttcccagggccatccctccttagggtcagcctccatcccaggacatggagccctgccccctacctcaactgggacaaccctctcccctgccctgccctccaacaaagggtactgccagaaagaacctccctatactggattgaatggtgtccaccaaaatcgatgagcttcccggaacttcggaatgtgaccttattaggaaataaggcctttgaagaaatacttagttaagatgttgtactgaagtgtatgggccctgatccaatccctggtgtccttatagggagacaagagacacacagccacagaggacaaggccatatgagatggaggcagagactggagagatgccgccacaagccaaggatgtgtggggccaccaggagctgggggaggtgaggaacagattctccagagagcctgtggagggaaccagcctaccaacaccttggtgctgggcttctggcctcagaactcagacagtgaatctgtgttgtttgaagcctcctagtttggtccttggttacagcagccccaggacactcagtccccagcagcccctgcagcaaatctcagtgtctctccccccatctgtttgcagaggccccatcaacgaacaaatgcagacaactcttcctggagttttgcattaaagacaagaagctgggggcacagcgagggggacatgaggtcaaggcgctgctgctttgttaggtaggggagattgagcatgtttgtatcctgatgggaatggacaagcagcaggagcatctgatggcacagcaaccagggggccaccccttaaggacaggtgggccggcttgccttggagcatgggtgcttgctcacaggctcggggcaaggcacagatgcgggaggcacagacgcggcagtgggagcagctgggtccatcttctcccagctctgggcacaggtgggaggcacagtgcgtgctttccctgcaggcttcctgtgcttcgccccgagccatctccccaggtctgagttcctctgctggtccaggagggtctcagtgcggtgggacaaactcgttccattggtggatggagacacacccagtgtggacagaggctgcaagcatcagagggcgtgtccatgcggcagtattggtgtcatggccataaggttggcacttcctacagactccggccttgcattttcagcagctggagctgttcacagcatccttctcacaggagttttgggagcacaaccaggtggggtatgcttgaaagccttagagtgaggaccagcacacccaccctcctggtgtcccatgcaaagctgctgaaggggctgctgtggctgaaatctgagctctgggtggtgcctgcaggagcccaagcagctccagagggagccccattccacttgaccccttttccttatggcagattcagcttccctggggtgaaatcgaggggcatttcccagttatctccaggagtatgaaatttccctcttgtttctgcccacctgaggggctgcacttggaccctgccatgggaagaggtctgttcctctctgcctcctgggggaccccctccttgtgtgagtcccctctgaagccctgcagaacctggtctgggtcctgaacagtcctgccgaggcctggcctgttggacacagatgctcaaaatctactcagagcatgctggcccctgtggagtggttcctgttcctggggggcttaagtgaatgagggcgagtgattcctttaaacattctttatgtgctgggcacagggctaggggctcaggaaccaggcgtgcgaaaccatgcatggtcatggcctcaaaggccgagctcaccatatgtggacacacatggacaagggggtcactgacctgggaaggctgtgaggggcactggtcagggcaggaaggccttcctagaggaagtgagtcaggtgagaagaagttaaggagcaccgttcctcttcttgggaccttgggcatgtctgtgtccccagctgtagcagaataaggtgccatctatggatgtggtgctgtgtggtctcatgtagccccatccacggcctgaccttcctgaaatccataaacgctgagctacagatgtcacatgtgtctaagatcactggacagaattagcatgcctcaatgaaaatgaactacgtccccaagtaatggcacgattgcagttaaacttatgcaacttcagaaataacggcagataaagggctagagacgtagaaaccgtggctggcatgagggaggagcttagtgagccatgggatgaaggaatgtggtgcctgcaggagcccgagtggccaggagccctgctcttcccaccgtgggactcctatggcctccccaccactccagcctctgcctggggctcctctagcccctctagttgggagaggtcatcccccaacagagacacaaagtatcaaaaagacaagcatgcttttgtttcctgtttccgtcaggtgtttctctgatccgtaagagcctcctgcccgttcatccatcaacagcctctggggacaccttcggcagcaggaatcactggtgttgggtactgagtttgaatttctgtgcccacctttgcgctggcacaaaggggctggctatgtggaagcagaatgtggggcccttgctttaaagacctcagaggctggttgaagggataaacctcacacccccaaaattgagagaaaacatcaagggagctgcaccgcagcaccaccttgctctctgggcttcagcaccagggaggcggacagctccattcactgtggccgccaccgcccatccaggactccagccctccccgcatcatcgctctgcttggctgtcgggggaggagagcggctgctgctgtgcatgggtgcttgggggcggtggggggtggggtgcagaggaggcaccaccctacccggggccatcaccaaccaatggggatgggagcgggtagataaatgccccagcctccccagcgtcggtggacagtttggaagtgcattcattctccatggcttcccagagggcccccagcaggcctgagcagcagctcttgtgaaactgccctccatgggctgctctctcttcctgtctcactgtgtgctccgtccctcacttcagcttcctggtctcacatcccaaacacactaccttcgtccaagtccttgtctccaccagggcttacatttggggtgcctagaaaaggagagagcatataatcaatgccagggtgagtggggggacacccagagccatgaggtcccaaggagggggcgatggcagggtggcccgtgaggcaggtggtctgggcccaatccccggctcaggatggacagaaggcaggagcagcctctgtgggggctggtgacagtgtgagctggcccagcagtgggtgggcttggctccaagggtgccacagggactgtgaagcaggctggagagggtggcgagcgggcctccagtgggaaaaccaggcatggcactgaggcgggcaggtaagttcagccctacactcctcctccttccggccggactctcacgtggatctctccttctggctgtgcaggttggatctatgaacacgagacacagaaacaccagctggaggagcccaggaggcccagcaggtgaggttatccacagaataggcacgccgccctagtccatggatcactgagtgcccagaccagggcttcagggggttccagccgaggctttgtgaaccggatcctgggtcactgagtaaccagactggtctcaggaggttccagctgaggctttgtgaaccagatcctgggtcactgagtgcccggaccaggggttcaggaggttccggccgaggctttatgaaccggatcctcctctttgcgtttcaaacagcgggaaccatcttagtccatgggccactgagtgcctggaccaggggttcaggaggttccggacgaggctttatgaaccggatcctcctctttgcatttcaaacagtgggaaccatcttagtccatgggccactgagtgcccggaccagggcttcagggggttccagccgaggctttgtgaaccagatcctgggtcattgagtgcccggaccaggggttcaggaggttctggccgaggctttatgaaccggatcctcctctttgcgtttcaaacagcgggaaccatcgtagtccatgggccactgagtgcccggaccagggccccggggcttcctgacagcaggaacaacaggaatcattcaaaccctggagcccagagggcaggacgggagcggccttttgtcccccgcgggcaggccagggaggtggacaggccgggagcctgaagcctgagcagctggaggctcgctcattctcccgtggtcactgtgttcccggagccccaacagagggccaattgtcccacggggcggtgcctggtgggtgtggtgtcttggcggcagccactgcctggctgttctcaggatcccaatcccaggtgaaggctgcagtcctcttgctgtgtgtggactatttagctccgtgggcggccaccttgccatggggccacagcagccattccagaggctcccccagtgccctcctcgcccgggggggggtgctcccgggtgtggtccggctgaggagtctcactcgcaggaaaggtggcgtgtgacgggctggagccggcctgcgaagtctgcctggtggccatggctcaggggcctgtgtctcccggacgcccccagcggggcctctcttgaagggactttgtgctcctgccaggagaaaacagccctaacagctgcctcctgggccatttccaaacattcgtgtgtcaggccagagagcgccagttcgttgcccttttgggtggttccaaacgtgtggagttggggccctggcagcttcggaccaccagccccccttcactgaggggttcgtcatcaccaagcctcagccagagatgttaaactggaaaaacaatcacggacccccgtgggggaagcagcttctggtctggggacagtcatgagctctgcatgcagctgccggtgtcccttctcggtgcctggcgggtatcagggctcacccttggcctggccacacctaccgcctctcaggcccacacctcttcccggaagacacctggaggcttcaacaccggctcacgccctttcctggaagaaacctggaggctctgacgccggcccacactccttcccgaagaaacctggaggcttggacgccggcccatacccatttttggacaccgggggcttcaatatctgtggcatcagctcctcagctctctcttccctcagcatcccactgacccgaaattccaggagatcccgagatgggccaaacacaaaacaagaaaacaacaaaaacaccctctccagaaagtagagaggaggctcggagtgaaggtgtgaagtgctgtgcccggcacaaagttcatccggacagagcggctccttcccatctgaagctcccattttcctacagaaatgagttccgacatgcactgcacagctgctctctctccgctttgcaaagcaggaactcatgatgtctgatgagaatccactctgctctggtctgagctggggcaaatcttcgtttgtcctccgcctgtccaacccagccctcgcctgcagggcatctcagagcccagcaccttccctgacgctctgctgagcccggagccacttggagctcaggaacagcagagggagggaggccacggggtctcagcacagaaccagcaagtccgaggctggacatctgagcagcgggtggttgacagggcccatgggcagaccccgcgggcagaggaccggggtctctgcctcacccgcttccaccgcccttgggtgcacctggccaaggccgtcagcaaaccgagccaggcctgtgtcctggttccctcatgggctcatggtcctcctgccaccctgcgagagcacccccgtgcacgctgcctgcagctcccagccgcgaacggcagaggcccagtcccgccgtcacaccctcgtcccgcctggctttcagcgacgtcacctttgcctggcaacattcaggcggggctgctcaggcctgctgattccatcatttaaagacgcccatttcttctaagccagggattttatgacgctgaggattagaagctgttatcccaaccaaccctggagcactctgttctgatttgatggtaagcttcactaataaactgtttaaaacatacgctaattgtgtttattgtattctttaattatcatatgtatcattaaggatgtgcttctcctggaatccgagggccttgcagcctctccccgccgtgtgtgcatgcgtgcacatgtctgtgtctccatgcgtgtctgtgtgtgtgtgtgtgtgtgttcctagtgcacagaacatttaccttttacaaattagaagaaacatctgtgggagcctgtggtcagttcggccttcatttaaagtgaggatttagacagtctctgagctttgccgcccctggaagcagaggcgggaaacgaccggataaaacagaacgatggggagtttcatcctgtcatttattttgagtctgactacagatcattatttctcattttggatttcagatggtttgaaatgcaagtctagctgctcaaccatggggctctagaaagaggtgcctggctatcactcaaggggttgtgggagcccaggacggtcggaggcgctaggagctctgggattgcctgtgaggccgcgcagagacaggagtttaagatgaatgaagcaccccaaccttgcgctctgggaatgcgccgtgtttaaggctcccctggtcctctcccgggtgccccggacccttcccaagggctgctctccctctcaccgagagcccccttgcctccgaccgcacccctgtggcacctggtcagctgcgttcacgtctgcaggtcggcctctatgggggggacccacacagcgtcctgcctcacttcagtagtgtttccattcagaccagatgtccagccaaggacgttctgctcccaggtaagacctgtgcacctgcctcatcaccgtgggccagtgcagggcctggcaggagctgagggtcctggcactgctcagggagggtcccggggccctgcagctcacgtggtccttaccagaatcaggccctggccctgcggactggccaaaaacagggcccaagccaagccgcgttcccgtgggtggacgtccacttattaagaaggcctgtgtccacaggaggcgtgattctgggcgtgtgtgcacacgtgtgtgcgtgtgcgtgaatctgacacagaacacctcagctgttctaacagcctgcagtgcgcaccggggtctttctggaggagacctgagctggcagagggctgtgcggctgtcctccctcccctgtcccagccgcatgtggagaaagaggggctgagggacgtgagggggtggtgctgtcggccggggtgagcccagctgtggctgcaccaggttcatgaccctgtctgtggcatccagagctcactctgattgccaagtgcaaacaccgggctgagtgaggcactgattcttaagggcagaaaaattcatgctgagtgctcagcaagggtgtacacagatgcgtctgggcccactgggtgaaggcacgcgggacccctgtgactccggggttgaccctgctgggcccaggaagcagcgagcaggaaaacaagcctcacctctgttggaagtgggcttcctggtgcgggggtccccactccccaccctgcagcccctcctcacgtctctgctcttccggctgccaccaggctcccggcacgcggcccttcttccttctgagttgtttttcaggggctgcgctggggtcccacggacacctcgccagaatcagctgggttcccatgggaaggggaagtgccgctcctgcgtccctgcacccttgccctctgtgtggtgtggcgtgtctatcccgactggcgaggccgcgagcccatagtttgctgctgctccttcaccgtccgtgctcattcctcagcctggtacagccccaaccccctcccacctttgtgtggttccaggcccatgcatgacacgcgtgttccatttccacgtgctaccggcaccagagcccattctgtacatgctcgtttttacaaccgctttttaaatcagcgaagagaggaaaggaggtgactctacgctcacagcctcttgtagccgcctttcccgggctctgtgcgcctgggctccagtcaccgtcggggccccgtgcctgacccctgggcagcgtcctcttccgtttcttacgaggtggctccatgctagggcagccgaatgccccagagaaatgggcaaaggtgtgcagaagttatccctgcccaacaggagggagcacggccccaggtttacctgctgtgccttccagggaaccccttgcaacctcagcctgcagggacccagggcgtgggttctggatttagacaggtatgggcctcctcgcatcagccgtgtagacttgggacacgcattcgtgtctggacgcagtttcctcacctccagacgggaatggctgcagttccgtgatcacagttcagcgaggatgaagcaacccctccaggggaagcctttccttacaggaccaggcaggtggaggctctgagcagaggctgccattgttcctcttgctgcaatgatgagcgtctccagcacctgggctgcagctgtggtgtaacaggtgcgatcagaacacctgcccagcaccgggctcaggctcagagcgtcctgagagtggaaggggtggggaggctggcggcggtggtggtgaggcgggagcacctgcaggctggggtctcaggcagcccccggagcttgctgggagagggtcccgagctggggacccagagctgacttgagctttgctgatgacagacatagctcatcagacagttgtcacccaggcacctgagaacatggtactactcagggaagggcacatgggcattagccagtctgtaaacataccgcaaactctatagaagtaattgaatagtaactatcatgtaattgcagggtaatcacatggttatttttgctttgcaaattaaagtgttactatgagattgaacaattatgcggggtaattataccctgattcacatgctaactccaagcaaaatcatcaggtaaaccctagggtgggtagttactgtataaatatggagtcgttgtgaccacatcattatacattagtgggagagtagctggcctcctttgggataagcctcccactgcacctgaccctgacttccctactgagcacggctagaccccgagagcaacaccggaagcccagaggcagggcgccccgagacctcgcaccaggggacctgcttgatggggcccgtttttgagcatgaagcacattctgagaaagttgttcttttcctgacacgctggggtttcggcagggctggctgccagcacattagggtgagaactggctgcagagactgcctctgtcacaacctggcctgcaggctgggccacctgcaccacacctgtgccccaggctgttcaactcacttgtgacttcggcctcacggcaaccccacaggtaaccccaagagcgggaggcacctgtgtgtcagtcacgccacccccaggcctggaaaagtaccagcacctgtcaggcaggcctgcgtcctcccggaacttagtcactcacacatatgctgcgatgagccacacccacccaagatgccatctctgtccctgggtgcaggtgaccagacagaggctggggagatcgtccctgggtgcaggttaccagacagaggctggggagattgtccctgggtgcgggcgaccagacggaggctggggagatcgtccctgggtgcgggcgaccagacggaggctggggagatcgtccctgggtgcgggcgaccagacggaggctggggagatttacccaaagcccccgttgttatgcggtgcaacactcagctcccagtgtgccctcaggaccgcgggccaggctctcagccgtgcgctgctggcatctgggaccgagggtcttggtgggggctgctctgactgtggcagcgtggcagcttccccggcctcacccatgggatggcggtagcatcctctccctattatacgtttaattataacaattaaaaatatctccagacactgtcaaatgtcccccggggacaaacattgactggtgatctggcttttacaggaaaaggttgcccacgctgggtcatgactggagtattggctcaaaccaagtagcttcaggaaattgaaaaaggggattgtgagtgactcagggaattgataagttaaactatttccaatatacactgggtgctataaattcattatatgtattaaacgccaagaccaggagtgctctgtaagccatcagtgagctgccaaggtggcgggagccacatctgggagccctcagtcacatgttctgcttgggaagtgcctggggttgagggggctgcacacagtaggctctcaggcacacagtaggtgctcaggcatgtagtagatgctcatgccaggccactgagactcataggccctgtcatcagctgagcatgtttcttagacgaaagacctggccgctccccctgcctcgcttttttttttttttttttttttgagatgaagtctcactctgtcactcaggctggagtgcggtggcacgatctctgctcactgcatcctccgcttcctgggttcaagcaactctcctgcctcagcctcctgagtagctgggactgcaggagcatgccaccagcacgcctggctaattttttatatttttagtagagacgtggcttcacagtgttagccaggatggtctcgatctcctgaccttgtgatccgcccaccttggcctcccagggtgctgggattacaggcgtgagccactgcgccaggaccccaaggtgctgggattacaggcgtgagccactgcgcctggcccccaagatgcttttacatttccactggacccttgcgggaggcgttggctgggccgccctccaggacactttgttccctctgctcagggcattctcaaggcctcagcgacactcgggccagccttcccttccccaggacacctgcccgttcccatccctggatgtcccaggccccaggaacccctgtgccagccatcctggcagcccacctgcccacctgacaccctccccacaccagcctgggatccacggaaaggcgcggatgtgtcacccttgggagccaaggctgcactgacaccagggcctgttgtgacctcagtttaagggcagcaaagctgtgagccaggtgaggcttcttggccagctggaggctctcctgggacacggtggggagttattggggagggcccagcatccccttgaaatagagtgttgggacctgaagcaagagtcaaggataccggccgtcctggctgatggccctgaggctggtctgagtgctgccctgaggggctggatgatccctgcagcctcctcccctctcggggcctccgttaggagagggccaggaaggtccttccagcctcggcatccgtgtctgcctgtggacagaggcaggcctcgcccctggcccgccttccttgtaaccttgaccccacgagagacgctgggtcggggcgttggtggatggtgccctgccctgcatcgccccagggcgttggtgccctgccctgcatcaccagcagcagcactctccttgattaagcagcaaggcaaggtgggtgctgactcggagtcactcacagaccggaaggcgaattgcagagccgcaccctgtaatttagtcaaaatgaaaagggcaggaaggaaaggtcaatactgttttaaattagtctaactgctcctttatgtagaggacactgttgctccaaaggactggcgatttagcagttggggagaaaaggtcaagcttcttggtcctagggcaggtgataaaagccagttaaatttttggaaatcatacctgcaggttgtcaattctggcaaattctgtacaaattagtctactcaaaggcttgaagagaaggcgttgcaaacctcactggcaagccaggtggactggggtgggatcacccatacaggcatggggaggggaaggcctggggctggggtgggggagacggtcaggccctggcccgctccatccagtttcctgcagaccggatcccaggccctcctcacagagcaccccacagaagggctgccccgcagggaggcgctgcagagggcaccccaggtgtccccttgcacttggggtgtgcaaatctgatccttgtctgcatgagcggacagagacggtgccggaacgaccctgttcaatgtgtagcaccaactcccggccacccacaccagacaccctcacccccagtctggggtttctggagaaggggaccaggggcggctcccttctccccgcaggcttgcagggctgctcctgacctgtgctgcagctcctggctcctgtggggcccaggttcccggggctgcgtgggagacacagaagtgggggcacctctgcagcacccacatcctgccgacgccatgcacgtgagtgtgcatgtggggtgggggtgcgccaggaaggcaaaaatcccaaatgtcagcgcccggtgatttgaggagttcagacaaagccttccctggggctgtcctcggcccacttccccatcatcccaatgtccctgcagcccttgaaatggctcggatgtggggcaggagggctgggcggatgctgatctgaggccgaggttgatggattccggctcccccagtgccgatccggctgctgccccacgtggggctttgaggctgcggcaacagagccggtgggacacgctcctgatgccagacccaggggtaagagctgcccctgctccacggtctgcgccacgatggctgccagagcgaaaatgggagggagagaagcgctgtcagggcctcccagggagggtgtgtggcgtgtggcttgctaagcaccctcttttctgatcccgccctgagcagctccctgggacttttgttggtcaaagcttcagctgtggtcagaggatccaacgctgccgtcaacaggcagctgctgccgtatggctgcagatgtggtttctggaacagacgggcccagccctgcaaggtgggctggctctttggctctcgagagcaccatggcacagtgctgatctgggtccacacggcccagccacccggtcagctcgcctggttcttacatttccactccacaaacagaacccagacccagatctgcttcctccgcctcccgccctcctcgccccgcaccgtttcttgtcccacagaagctgtcatgggtgctgtgtaccccacagggcgggagagaaaggtgtgtccaggagcaatctcgggaaacagggggcagaggatgcggtgcagagccgagctccggagccaccttcctgaccgccagagcctgactgcatccgtatggcatgaggtcggtatctaggaggccatactctttacctaacatccaggacacaggaaaaggacggaaacagaaaaaaatacataaataaattcaagatgcattttaaagaacatgaaaaactttaaaaggacgggtaattgtctaacattttgttaattcaatcaggcttgcaatttaaaaatagctttgccttttactgaaaaagaaattaattataatttcttactgaatccagggagagaattcgggactagggggttccctgagaaggtcttcttacacgttaccctccaatgtcctgtggccaagggagcttcaaccccctctttacgagggttctggtggctggagaactcagagacggctctaaaaaaattgcaagctggccaggcacggtggctcacccccgtattcccagcactttaggaggctgaggcaggcagatcacctgaggtcaggagtttgagaccatcctggccaacacggtgaatccccgtctctactaaaaatacaaaaattagctggacgtggtggcgcacgcctgtaatcccagctactcagggggctgaggcaggagaatcacttgaacttgggaggtggaggtcgcagtgagccaagatggtgccattgcaccccagcctgggcgacagagcaagacttcatctcaaaaaaataaaaaaatgtaaacatcgcaagctgcacccaggtgtgaatctggagggcgcctccttggaaaacttggctggtgaccgcaccctcagttcaagctcaccggccgcccttccctgtgcacacacgtgagctctccagtatgtttggaatatcccagagccgctgtctcctggctgcccggcctctgtgagccgcactccagcctgaaggccaagacggctgctctggagaaagaacttcccctggtgctgaagtcccgaaggagagccccatgggcatggggaggggagggtgcctcgcccccaaggctgcgctgctccgcggcctggccgggaccaccacacagaggcttctctaggaaacaagccacactcagtgtggcagcagtgaagtgcttttctcagcttcctgctttcctccagagagtaaaccagtgcctgaccgtccggttctccctgaatcaacactcaccgaaaggagctggtggaggggcccgtgggcgacaaacagccacaaaccagaccccggggtctccggagctgggggctctgggtggcccaggggtcgttaatgggcacggtttccagtccagtccaggccagctgtggtggggctcagacccgtccagacactgggagccagtcacccccagaataacgagctgggcctcgagttccaagtcatctttgagcagccgtgtgtcagcaccgctgtccctgaccaccccgtgccggtctgcctccgtctcctccttctcgctgtaccccaggtcgggagctaaagggcaattcagagcctgctgcctgcaggcaaaacgtctccccagcaccgcaagtctgcgcaatttgaggcccagaaaccccctggacgtagcttctgcttttcaaaaactgttcattcgtttagccccaggggacctcatccctgtatgtccacactgggcatcccaaggaagctgggggggaaccgcacctgcatccctccaactcagaaacccccttctgcaccggcagctccgggcccgcactaagtgtgcagcgtggccatcctgcggctgagacacagggtgtccggcagcgtttggatggattctacaatatttgggacagacttacactaaaaaatcagtcactgcttctccaaacttcctgttgagctgggcaccctgtgtttttgtttgctgcgtttttgtttgttgtatctgggtaccctaagaatgatcccaaattacaaagtcaggccctgcagactcatgggaggcagaatgggggcccctaaacatgcccacctcccggtgcacggaaactgtggacacatgaggctgccagtcagccgcctgacacggaggggtgaccctggattatccggggggacccagtagaatctcgggcccttcaacatagaggcggagggcagagcaggtctcagtgacgagacaccactggctctgaagacggaggatgggactgagggccgaggggttctcccctggagcctctagaaggaaccagccctcccaagacctgatgttagcccagggagaccatttcagacgtctaacctgcagaaatggaaagtgtaagtgttcttttttaaaaaattgtcatgagtacatacagggtgttgctatttatggggtccatgagatattttgatacaggcatccaatgtgtaataatcacaacaggggaaacggggtgaagccgctatgtttgtgataattttttagagcagccataaaaatatatgtaaataggacctagttagataacatatatttttggcttctgctctgtagaaactcacacatgatttggggagttgtgaaggcctgatttgattttgtttgtttgtttgcttgcttgcttgcttttgagcctggtgtgccgggcgggcaggtgtttcattgaacctggccccttgcttgttcaagtgttgagtgagggcagtctccaggttccgggagcttccgagtgagcctcacgcctcacggctgcaggtcagaaagtgatttgtggcccagagacccccggacgtagcttctgcttttcagaatctgttcattcatttagccccaggggacctcatccctgaatgtccacaccgggcatcagacctggttgcagagtgggtggttccaggaggcagcagtgtagaccagtgaaggagcagccagggcctgagtgaagctggggcagcagaagcagctttcgatattttttttctgctgagtcttgccagcttttagtttagaagttccttcctggggaagaaagtggccgcttaaatggcataaaaaataatgcaccaggcaggggacccttgagaccctggggctgggctctggctgggggcctcacacggaggaggagggatgagactctcaaggaggccaaggtcccaggtcctgggctatcggaggctccttggggcctctgccttccccaggagcaagcaaggaaggaatgtacagcagcagggcgtgggcacagggcagccccaggaacaatggggatagtcacgtggccccagcctccacctcgctggcactcctcttgtcccaggacaagcccagcctgctgcccgctgcctgcttctcctgcattggagggctccaggcccagaatagctgctcggagccagcatttgcatccacgtctcctccacacgttagaaaacctggactttgttttgtaactgctggttccgctcagcaaatagaattgtacctaactgtggaggggccctacacagtggcccggcccgggagacccacgagggcctcaggagcatggcttctcccgtctgcctcctggtttctgtctctgaccatgtatctccaagccagtcagtcctgagtggccacagtggggatggggctgcaccaggggcctgccctgctgtgctggcctctgccagggctgggccctgcctgtgaaggagccctgggttgggctcttttgtgcccactctcaggtggggttgcgggaggcctgcttggccccatggggatcagtgtgatgagcatgactggaggatgtgcgggcttaggatgagcagagggaccctacagagccacgaccccaggcccagggcccctgttggccccaaagcgagtgtggtggccgtcgttgggaccccaacagggggtggcactggcgtgaggtctgacacttgccaaattcctgcgagctgacccctcgatggggcttgcactctaattctgccccagggaagcccaaggtcaggattagcatcccccctgcttaagggacagctgaggccagggtggggctggggtggaatggcgggctgcatgcaggaagcccatggagcccagatctgctccaggtcacaaccctgtacctggcttggggtccacactccccagacacagatggtggcatgttcccctcggactgtccacctgttgttcggccaagccctgaccctcacagcaggctgctgagttcaaggatgcccctgggcagccaggctgggacccttgcccactccctggacgcacatccgcccgccgctgggttcacaggggagggattagaaacctctcaacggaacgtcgacgaggcgagtggggtggggatgggggtgggaaggggacaggccctcccccacacgtggggagatgcatggctgtgaggtgctgcctccgcctctgaggctggcgataggctggattcagacacagctcgagccgctcaccctccacgtcctgcttaggaggagtgcggggccggctaaatccccaatgcccagggcccaggggcatcccatccatagcctcaaggtccctggcttcccctggggatggggctgtcgcacctgtgtcctcccagttccgaggtaccattgatacacacacaggggtccctgggggagtttcctaactcctcttcctctgaaggccaggcctgggagaatgaattctccaagcacccaccctcactgtaccacggcaggttagagaatgcggacagagctgcttggctgcacaccttgggggggcgtcaccctctttttagcctcagtttccccatctgtgcagtgggtaccagagaggactttacacagaggctgtgcattcccttttttttaattttttttttttgagtcagagtctcgctctgtcgcccaagttggagtgcagtggcgcgatctcggctcactacaacctccgcctcctgggttccagcgattctcctgcctcagcctcctgagtagctgggattacaggcgcacatcaccatgcccggctaattttttgtatttttagtagagacagggtttccccatgttggccaggctggtctcgaactcctgacttcatgatccacctgccttggcctcccagagtgctgggattacaggcatgagcgaccgtgccctgactgaggctgtgcattccctaacagagggggacgtctggctgcccccacaaaacagcagctctgagcatgtctaaggtcagcccctccctgctttccttttctccctgatcaaattcatgtggcttccactcagccccttcttccggctcttacttaggaatgcagatctaccccaaaccccaacacacactggaaccctcaaggtcccatcctactgaaagccaggtagccggtgcagtgagcaatggacagatggatggatgatggatggtggatggatgatgggtagatggaggaatgcatgatggatgaatgaatgaatagattaatggatgaattgagtagatagatgaattgatggatggatgatggatggataaatgaatggatgatggatgaatagattaatagatgaatgaatgagtggatggatggatagatgggtgaatgcatggatggatcatggatgatggatggatgacagatgcatggaaggatagatgaatgaaagaatgggtgaatggattaatagatgaatgaatgagtgggtggatggatagatgggtgaatgcatggatggaacatggatgatggatggatgacagatgcatggaaggatagatgaatgaaagaatgggtgaatggattaatagatgaatgaatgagtgggtggatggatagatgggtgaatgcatggatggatcatggatgatggatggatgacagatgcatggaaggatagatgaatgaatgaatgggtgaatgaattaatggatggatgaatggatgacaggctctccatgagccgctctgctctcctccatggcctcctgctcactggcccctatatctcacatcctacttccagtttaatggagacaagagtgtcctccccaacccaagttctcacccccatcccttcctccctcagacccacctggaagagctgcttctcttctcttgtagaagtctcccatcccaaggaggtgcctggtctttcccctcaggaaggcacctggtccttcttcctcccttccctcctgggagacatctggcccttcacctccccctgccccttcacctcctatcaaggcagctccctcagtattttctgcagaccttgtttgtctcctgtgacgttcataccctcccgttcccacagacattcttccatgtccagcccagacagaaggaggtccccccctgccggatggatgattgaggctgcctgtgtgtacacgtatgactgagcaatggacggaggtgtctgtgtgcagcaggcatgtggcacgacctcggaagagggaacaagacaagatgtcccccaaggtgcccatgaggaccctccctgggcagctggactccagcccaccttgggctgcagtgtgcattgggggtggggccaaagacccctccacatagagaaggcagccaaagggaggagggagtggtcagaaaaggttgtctcagccagggagcggctccaccctctcctgaggacgcctgacctcagacgtcagctcccgttagagacccccgtataccccctgcctagagccaaactctgagagtctctggatggactgaggggtgggacaaggaaaaaaaggaaggagggagggagagaagcagcaaggaggggtcgcctggcccggctcccccagtgaggaaaggggctgtggcacagagattccatctgcagggctgggggcagccgagaatggcacctccaacgcccacggcaggggcccacccgcctgcctcctccgggaccaccgggcctggctcctctcacagactctttgagagcgtatttgtgaaacgtagcatattgtgggtgattagatttaaatttcaatacactttgttaaaaatagagttggctctcgccaagaggaggccgcaggaaggggctctcaacggctcgtctttggaatattaatagtatggaaatgttattagaataatttttcatcatgaataataaattaatggaataattcggcagcgccacgtgacataccctgctaagaggggctttgttttaacagaatggggagggtgggtttggggtgtgggggagggcagagctgggggagggtccgcccagggcaggcggggttgggtggaagtgagtgaggtgcctgaagagatgaaggctccggaggcatttggggaggaggacagagacctgggaccaagtcctcaggcacttttagcttcatgtctcagccagggttctggccctggccggctccttcccacagaaaagctgggaagagatcttggtaggtgtccggccccacacaccatcctgctgggggtggctgggttggacttcaccatccccacagccctgcagcctcccctcctgcatctttctccttggtaaatgccaggaacctcaaaagcacccagaggcccagagaaattgagcacacaggggtggggaattcaagagcaggagctgtttctagggccccaggggcagggccagggtctcctggtcatttctgtgctcgggacccctgctgcacctgagctcactgtggaaactgcctgagggggccacacggagctgatggggacaagcatgcagggtgggcacccttgtgggctcagcttggtccagggtgtccactgggggacggggagggagatggagcaccagggaagaagcgtctcttcatgtggtcagcgccccctccttctccccactccctccttttgcctcccttcctgctgctgcctgcacggtgagaacagagatgagatggcccctgcccgggagcagtcagcggcaccacaaccctcccaggccaacccagctcctgacagagagggagggaggcagcctggggctgggggccctggcagcagtggcacacggagtgtgcacatggatcctagtcagccttttgcagggcgctgaagccagtgggggcccccagggaggttttgggggagtgttgagggggcctgaagggttccgctcctcccacccagggaaccgccatgccactagtgggctgtcctggagactcggggagaaagcacacaggctgtcgggaaaggtgggtcgcaggcgggcagggcagccctgctgtactgatgggcaggcgctgggtgggtggaaggcaaagccatcaggtcatccccctctctgtccctgcattgggccaaccaggtgtgtcaggaggatatttgaccattcctgagaggcacattctctctctctctctctctctccctctctctctctccctctctctctccctctctccctctctctccctctctctccctctctctccctctccctctctctctccctctccctctctcccccctccctctccctccctctccccctctccctctccctctctccccctccctctctctccctctctctccctctctctccccctctctctccctcctctctctgtcacacacatttgcacatcctgcagtgtgaatggagtatgaatgtgtgtggtaggcgacagctgtgtgtgtacgtccgggtgcgtgtgtgcgtgtgtacatgtgagcgtgtgtgcacgtgagttagagcctgagtgtcccctgcgtgggttagtgtgtgcgcccgcccggtgccctccgtcttgggagtctgggctgctgctccgcgggctctggagccggcgctccccacgagcccggactctccgccgcgcccgggagctgcgcaatcggctgctaagacgccggcgccaccggctgggccctgttctcccctctcttttctacagtcttacccgcagctgacagggttcgaaagagcatgaaacggaggagacgttacagcaacgtgtcagctgaaatgatgggcgtagacgcacgtcagcggcggaaatggtttctatcaaaatgaaagtgtttagagattttcctcaagtttcaaatgaggcgaatcccgttttccgcgatgctgcagcgcgcgggttttaaccgcagggtcacgcggaacgccgcgccgcgcgactgtgcctcggtctctgcgcccggctctccctccggtccgcaagaggaggaaggcccgcggcgtgccgaggtcagcggcgcggagccaccaggcgagacggtcacggacgcctgaaccgaggtcaccgaggccacggggccgggaggccctcagcagagcccgggggctccgcacctcaaggccggccaggaagaaacagcagcaggagcccagggcgccccggggagcccccgacacgcgggccgagcgcccagagcggcccaggccctcgcgaggagaccggcctccccagggcggggcttccgactcgggcgcccgtgagccccggaggcggcgcgaaggggcagagtccgcgtttctaaccagcccccgggtgggcggtggcccgcgcggcacggtgggcgcgagcgccgtgggctggggccggcctgggctttcagggcgagggctttccgcgccggccccagcccacccggccccgctgcgcgcccctcacgctgcagcctgggaacctgggccgggagctgcgggccgctccggggaagcgggcctgacctcccctccccaccgccgcccctgcggtgagatcctgcctgccggggcgcaggggcccgcggttgggctccgggagacggaagaggccccacagctcgggccccacgcagtggacgctgccacttaattttggcgtaattgatgtcaaggcgggtgcccgggcccccagtgaaatgcctcatgaactcgctgcgaggaacggcgctccacgcggtgcacggtggccaatcagagctgccgcttctgatggaggctgagccggctggggaggcgtcttggccaagaaccagccccagcctcgctcagggccccaacccgcagaccatgtaattaagctgcgttctgcagccagggcaaggtgcggaggggcctgtttctagcattggggaggaggaagtggggaggagggagcggggaggaaggagtggggaggagggagcggggaggaaggaggagtggggaggagggagcggggaggagggagcggggaggaaggagtggggaggagggagcggggaggaaggaggagtggggaggagggagcggggaggaaggaggaaggagcggggagcagaggagcagagcgggagggaggatcgtcgtgcagggggcctttgtggatgaggctgggatgtccctgcccctccgttccctccagagtctcagctctgaacatcttcccgcacctctgaggagccaggcctggaaaccctctaaaatagatttttctgcctcaagacagaagatgggcgttccaggcagagaagagctgcccagtcacgtgctctgctccacctggtcagagacccttgacctttagaagactggacctgagggcgtggctggtggacctgagggcgtggatggtggacctggccacccagctgtagctttttgggttcctgtggtcccatttcttgggtcaatctcacacctggcagctcccaggaagacacccccaggcccctcacactcctgggggcagctggaattggcttcagggcgggaccaggggccccatgggtgtttggaatccctgatctgggtcaggcaccggcagcaggattccagcctggcctggactctggtgtgtcccgtttgaagaaaccccgccctgtgaaagttcaagtttagcatccaatgacccatttaagaggtttgctgagccacgtcacaggagggtctgggtgcaaacggaggtggcaacacacagagcgagccttgagcacccaggttacccccaggacctccagtctggcttgggggctcctgctgtcctgtggagcagccccctgggatcagggacggggctgagctggagagtgtgcaggattgattaatgatgtctgccacggtcaggccaactgctgtgtttctggggcccacaagctaaaaatggttggaaaaaaatcaaaacattaatatttgtgacatatgagaatgctatgaaagtcaactttgctatccataaataaagttttattgacatagccatgctcactctttctcatattgtccatggctgctcgtgtgtccaggcacataccaggaggctacagacggagctggattctttccggccctttgctggaggcattgctgacccctgctctgaggctccccatggctctcaggatccagaccccaggcttcccaggacattgggggccaatggctccctgagtgccctcctccccagctcttctcccacccctgcccccccaggagccctcaccatgtgccactcactgcccacgcaatctgacctgtgaagggcagacagaggagcaagcctgcctgaaaaggaggactctgactttgccactccgctgccctgcctggccccactgtggtgttaccaggaaaggccatggcagagggacatgcccacgagctgccctgggggagagcggctggggcagggagggcagcactgccctcagaaagccccgcggtggtgcccctacctcccctgggttccaggagtgtggacagaccctgctgggagcagatggcacttctgcagctgaggcctgctggacgctgggccatgccggggacttgagcctggggccacacgctcctcctggccgatgtcaccactcctcttccaacagtcttggccccggggtgggcctgctccccgcccactctctgtgtggacggatcattgctgccgccctctgttcctccctcccaggactcagaagaggggcctggtgtgaacaggaggcaaccgctgacccctggcctgtgcccacgcagaggccacctcccagtctggtctctctgggccagcccctggagtgtgcaaaattgaaaaatagaaattcctgggaagtgctgactctcctgcagtgctcagaggttcgccaggcctgtgcctgtcttggccgggcccacggctctcaatgtggtggccgccatcccgccagccttggccgctcggggactgtgggctgtgtgcctctgatgttgcatgggagctcagatcccccatctgtggactgaggcctctcagcctggtggccgctagacccaaataacacgtggacccggcccggccgggtcagaccccatcgaacacttgggggttcctgtcaatcacaggccctatgccttgcccggtgcctcaacgcccacggggtcagcctgttccacttcctgacaccctcctctgcactgggccagcctggcaaccccacctccgccacaacataaccccggatctgccccacccccaccctcccacagaacgccactgcgctcccgcccaagtcagtgtttcaggaggagcacagcagaaggtgcaggaagccgagtctggccaacaccctccagaaactcattcctgcatccccctgggagacctggactgggacatgggcacagggaggacctctatgctctggggcgtgggggtgggtagagtcaggaggggatgtggcaggaaacatgcccagccgctctccgaatctgcaggaggcacctgccatgcagctcggacctccctgggcttccgggcttggtgaccacaaggctgggctgagggtgggggcagctggcccagtaggggcggcgcaggtgacccagaacaggggctgtgggaggttaagggcttgctggagccaggctccggggctcctggaggaggggagaccacaggaagacctggtcctggagggtcctggccccgtgggcactccgtctttcttcctaaggaacaaccacacctctcctgcagcccgagcttttcttagagaccaaggaggccgaacaagaagcatattttccacataacctttgctttcccatgggaagggacgatggcctgcacttgctggcagttttggaggcatgcccagaagtttgtgtatctgtggatgctgggccaggcatgggcgggaccgtgttgggaggggcctcgttgctggtgtcgagggaatgagctcctcacaggcctctggacagtggccccagggcgcccagccccttcttatcctaatcgagatccctagaggacaccctgtgtcccctgagttctccagggctgaggctatctctgccccatgtctcaagcctcaagaggctcccctctttcttacccgaagaaactgtggttggcaggacaacaacagtcccccaaacgtgtccacgccccaatcccaggaccccgtgaccctgtccccaagtggtacaggaactctgcagatgggactgagttaaagaccccgtgactctgcccccacgtggcacagggaccctgcaggtgggactgagttaaggatcttgagccaggaggtcatccctgtataattctattctatgccataatctctttacatataaaataaacctaattgtatgtaatctgtatttatatattttatttatgttccttcctccttataggagcgaggcaggaagtgaggccatgggagcagaggtcagcgagctgcagtgtgaggatggaggaggggccacaagccaagggatgcgggcggctccagagggtggggtggcaggaagcaggttctctacgggaggctctggaaggagccagccctgcagacagcaagattttagcccagtgagacccgctctgacctccaggacaggaagacgacacgtcgtactgttttaagggctcattttgtggtttgtggaggcagccactggttctgacaccaatcgaccctgattcctccagtgagtccaagagcacagaacagactcccactctggctgaggacacggtgagggaactgtggtgaccccagttccgttcatgtggctgtcactccaggaggatggctctagagcagggaggggccaaagaaggcgaaagcagacaacgggtagcccatgctgggaggggttgcatgtgtggcagccacctctgagcgggggacacctgagctgggacctgtgcggtcatctgggagctgaggactccaaagaccatgtcaggttgaagccatccagcaggagtgacctcagacccagaaggcagcagtgaggctggactggggacagctggagagatggagacacaggggccagcagtgatggggacaggatgctgtgtgagacatccctggtgatgcctggcaaggtttccagcaggggatgggtagggtttgctttgtgctttcagagaagctctccagtggctggaagggtaggggtagcccagcttcagtgccaggtgctggggtcagacaatgcggctccctccactccaggtggggaagggttaccccatggaccctcctcgattctctggcccagaagggtcatgtcaggaggatgggcgtgggagctgcatctccctggagtccctactttcctctttctcagactgatactctccaggggagcagagctgctggtggctcattaattgtgatcaactgtgaaccctgagggaattgttttacttgagggaaggtggggcagagaactgaggagggagggaggcttctggtgagaaccccatttcccagatgacccctgacagcacccctgaccccaggacatggagaccactgcccacaaagggagcctccctgcagctggaggggctgctccctgctccggtcccctcaggttggactgaggctcggcttcaaaagggcccttgggcgggagccaccttccaggcagtcacccccgcccccaatggtgggacccagagggcaagaaatagacacgtctctttccctggattgcagggacctctagccaagcaactccactcatttcagcataattccttattcataatgtgtgagtgaggtggcaagggccataaaatcagccaataatacaaaatcttgtagtcttgttttgcagttctttcccagggctatagcccgaatgtttatgtgtcccccaaattcctatgttgaaattagaacacccaaggcaatggtattcagaggtgcggcctttaggaggggactaggccatgggggtggggccctcctgaatgggattagtgcccttcgaaaaggaaccccagactgacctctcacctcctgcactatgtggggacacacagaggaggcaccatggatgaaccaggaagctggccctcaccagacacaggacctgccggcgccttgatcttgaacttccagccatatatatgtatatcgtctatattcggcaccattcccaccagcaaggcgcaagagttctaactgctctgcagcctcaccaacacgtgttattttccatgacctttattatgaccatcctagtggatttgaagttgtatttctttgtaattttgatctccattttcctaatgactaaagatgttgaacatcttctcacaggcttattggccatttgtatatcttctttggagaaaggtctattcaagtcctttgctcatttatagttgggttgtctgtctttttgttgttgagttataagaattatttaaacattctagacctgagtctcttatcaaatatgtgattgacaaatattttctccaattctatagattgtctttttactttcttgataataccccttgatgcacaaaagtttttaattttgatgaaactgaattttttttcttgtcttgttcgtgcttttggtgtcttatctaagagttcattaccacatccaaggtcataaagatttacctctaacattttactctgagttttatagttttagctcttacattaagatatttgacacattttgagtttatttttgtatattgtgtgaggtaaatgatttttttttgcttgtgaatatatagttgtctcagcaccatttgttgaggagattattctttctctattgaattgtcttggcacatttgttgaaaatcagttggccatagatatataggctttctctgaaatagattctatgctattggtctatatgtctatcttgatgaccgcatcatactattttgactactgtggctttgttctaagttttgaaattagaaaatatcagtcctccatttttttctcctctttcaagattgttttggccacttgaatctccttgaaatttcatataaatttgaggattgggttttcattttctgcaaatgatccttggaattttgatagaggttgcattgagtctgtagatcattacggataatattgccatcttaatattaaggcccccaatccatgaacatgagatatctttccacttcattcctaggtattttattcttttgggtgagattataaatgaaattgcttcctaccttcttttcaggttgttcatggatggtgtatagaaacacaactgatttgtgtgtgctgatcttgcaccctgcaaatttgttgaattcattcatttgctctaaagggttttttttttttttgtaaatattttggagatttctgtatataggataatgtcatctgcaaatagagatttttttttcttttttccccagtttgaatgccttttatttctttttcttgcctcatttttctggctagaacttctagtatgatgttgaatattagtggtgaaagtgggcatccttgccttgttcctggtcttggcggaaagctttcagtctttcaccactggatataatgttagatgtgggttttccataaatgccctttatcattgtattaggccattcttgcattgccataaagaaatgcctgagactgggtaatttataaagaaaaggcgtttaattggctcatggttttgcaggctgtataggaagtgtggtgctggcatctgctcagcttctgaggaggcctcgggaagcttcgaatcacggcagaagatgaaggaggagcaggcaggtcacatgataaaagcaggaacaagagggggtggggagatgccgcacttttaaacaactagatctcacgagaactcactcaccatctcgaggacagcaccaagccatgagagatccaccctcacaactcaaacacctcccaccaggccccaccttcaacactggggatcacagttcaacaggagatttgggcagggatatatattcaaaccagatcaatcgtattgaggaaatgcccttgtattcctagttttccaagtattttgtcatgtaagggtgttggagttttcaaatgctttttctgcctcagttgagatgaccatatggatttctcaactttgttttattaatgtggcctattttggtgcttgagttttatacgtggaatcgtccttgcattcctgggataaatcaaacttagtcaggatgtataatctttctcatatgctcctgggagggtgtggaggctcagttccccactaggccctgctgaccccatcccataagagattgggtcaccacctatttccaccatgcaggggataaatgatccactctctgctcagccggtcgacaccactgagtgaggacatcagagaactgccacctgcctctgcagggtgggggtgaggtggagtggcctctctgaaaccacattggtgtctggctagagtagggatgacaatgcctaaagggggctctgttgtttgaccaccctctcctcatgctttggctgggaggaaagctccaggcttctcctggagagttttactctgtcagtgatgactgcaggttgaaggccactgcagtgtcctgtctatgatgtgtgggaggcaataaggaaacccagggcactcagcaccacgtcatcctgagtctggaggctcccaggcggtggccttctaggctccttggttgtgttatgtgcaggacttttgggttttagtgggaagatccaggaagattgggccgctccattttggtggaaacagaagtctccaattcacccccttttgagtatcctttgaggttttgatgggaacgtgatgacttcagaggcaaatctgaggagtgctggcacctgcatgctgcatgtcttcctacatccacggcacacatgtccacatgaccaggccatcctcagtggccttcacaaagatcacatgtgtccttgatgggcgactcttcatatctttcttccccattgcaaagggaattacttttaattgttctttattatttttatagggatgataatgatttttgtacatgaagcctatactttgctgattagttctcatagtttagctgcatatttctctgagcttctgtgcaattatattctatacgagaaaggactatttgtctctccctcaattcctagtccttgtcttttttgttttgtcttgtgatattggctaggacctctaatacaaactaaatataagtgtgataatgggcctttttgacttgtgcaataatatttccaaagttctattattaaatgttatgatgtttgctgtatttttttttgccttgtatccctagcttgctgagaatttatctgattaacgctgcaatttgtggactgcattttcttgcctctgttgaggtgatcacatggctgttctccttccagtggttcatgtggtttaaaacaaagtgtttctgagattgagccagctttgcattcctcttcatgacatactgttttatatatggatggacttgattttctagtgtttctttagtccttgtcctgttttgatatcaatattatactagacttacacattacttgggtagtttccttacatgaaaaacttttaaagacagatatttactattcctagaaagtttggtgaaacttgcctataaaacctggatccagaggtgtgcgtgtgtgagatagagggagagaggttcagttaccattttgatttgttcagtggtaactgatttgttcacttcttttgtatttttgagtcaattttaccatagtttttgtaaaattatttattttatcagtattttccaatttactaacataaagtgcttggtgtgatttacagtttttaaaatctgtactgtgtctacaaacacacaatattctatttttctctatcctaatttaaaaatctgttcccacctgcatgtgtctcacatgcacacacacagcactgatggaaacagcatgcgtgcagtaagtatgtaatcctggtgactgcacagaccccgtggtggaggagaacagcaggcaaagcagctgttgatccaggagcttttgatgcaaggttcatcttgggatctagacacagacataggtgggaatggtgggttagggctgtgctgtacctggccactctggaccatgccagggagtgctctcacaggtgccccatggccacctctgttgcccccacagcccaaggaaggactctccctgtgccagctttgaccaacactgccttggctgtgaaccaaactggacagaaacagtgtctttgccacaagttcacgcctggtgagggagagaactgagacacgtggagtccctgatgcaaggatggtgcagggcatggacagcaggaaggtaccttgaagggaaggctgggaggggtggggccacagaaggagaggcccgagaggcatttgtggccaagagtaacaagggccccccacttggactttactcacttctcatgggcactccacggcgggtcctcaggccctggaatgtggcctgctgatccattttccagatggagggactgaggctgagggccaggtggggtgtcggatgcactagaattcagacttcaactcctgtcctgttcaacccctcctcttcgggccatgcaaggaaggaggcctcgtctgaattgcccttcccaggggagccaggctcaaggtgacactgtgcctcaggtgctgtgagtccaggcgagttcagctcagtgtaagggcccctagcacggctagaatcaggcagagtgatggggcccaggacgtcctgccagccttgcttcctgaagaactcggacaggccagggctgtaccagagttcctatcagactgggggcttgtgaggagacctcacagactctccgcacaattgcccaaatctctgcctccctctgcatgcaaatggccttcggtgaccttggcaaggccccttccccagaatcactctctttatctcattttgtgcaacccagatgcctgccaccaatgtttcacagatggtttgaaagtaaaattagctgagcacacgggagctcatgcctgtaatcccagaattttgggaggccaaggcaggtggatcacatgaggtcaggagttcgagaccagccaggccaacatggtgaaaccctgtctttaccaaaaatacaaaaattagccaggcatggtggtgtgcacctgtaatcccagctactcaggaggctgaggcacaagaatcgcttgaacccaggagatggatattgcagtgagccaagattgtgccattgcactccagtctgggtgacagagtaaaactctctcaaaaaaaaaaaagaaaaagaaaaagaaaaaagaaaaaaaagaaagtaaaactgctgtttaagagtctattttaaaaaaaaagtaattgcatgcaatgtagatttgggaatttaatgcaatcaatgagttggcaatttcagggtgcacttccacatctatttccaggggaattttaattttcttggtctttcttttatagcaggtaaagcaagatgtcatgatcatctttgagaaatgtttgtttagggcatccagggcctttaagtgggaataatgatacttgggaacataaaattgcttctgaataaacgtctggctcataaggcagcagcactcagagaggccaagagtgcatctttatgaatgagcatggggaacgaaacaggctgagtaaccctgggcccacacactggctgctgccaaaagctccgtcttcagggagccgcgtggggatggccgggtgctggggtttccaggtgcttggattctgctcctgccagggagccaggctgtcaccatgctcagaattgacacctgagacctgcactttggtttgggtcccccagagacacactggagggcaacttgtttgtgtagggggtgatcttaggaaatccggtagggtgtggggaaggaagggagtgtggccgataaaggttgcagcaggatcggctgtggctgcagggatgttcggggagccaggacagcccgtgcgcctcaactttcccgccggaggggcaagggagccgcatgtttttgccctgatacccccagcgcgtcatgggttaaggctgctccaggcctcaggcagaggctctgggcaggtggggttccgctgggctgggtgaggtggcgaggcctgagggaagtggctggagctgacggcacctgctccttagatttaaaccagccgtgacatttccaatattcgtggttttcaaggcactttctcatttgtaaacgtggtcaccaaaagaggacagaggcccctcctttctcagtaaatacttgctgagcttctggggagtgctggcagttggtggccaccagacactcccagatccctgcctcttgcagatgctggtctcttctgtctggcacgcatgacctttgcggtcacactccaggatgtttgtcatggggctctgaggagcggggagtcgacggctctaatgtttgcataagtgtgacttttctgaatgcgttggcagagacgggggtgagaagcaaataatctgttttggttttgtacattctggtaaattctgcaagcgagactcccaaacagctgcctaagagtccagggtaaagctacgggtgacaatgccaggtagcaacgtctcattcagcatcactgacagcaccagatggaaagagcccccgccccttccatacacggatgctcatgcaccacaaacacacacacacacacacacacacacacaccatagaaacgtagacatgcaaatttgcatgcatgcaaacctgcatgtgcacacacagacacacacgtaccacacaccacacacacagatacacacagacgcacactcaccatacatcccacacataggcacacacatacacacacacaccacacatacggacacacacatgtgcacacagtctgtgtctgtggttactgaccaggagggagtgtgtggttgggggcttacggggtagggaaacctggtttggtctccctgctcaaaccagctctgaggcctccttaagactcggttttctcatgtgtcgcatgttggtgaaggctcctgccccaccacctcccaaggaggtgatggaacttcaaacatggtgacagatggagagggcagcctgatggggaggagatgtgatgagtgggtgccgtgagctgcggacggcaccgtgctgcagcccacctaggtgtactttggatgagcagagttgaggcagtcagtaggttggggcagttggtagggaggtacccctctggcacgggaagggctcacttgaggctggatgcatgagacatcctcgccgggacaaggcaaaggccctctccaccccaggtccagccttcacagagctgccagaggtgctgcttagaagcagagtccagaggcagcagccaggggctggccagactggaaactatggaagaggtgggaggaccacagagatcctcttctcaggtgagggctgcctcccccgctcctgctgtctctgattacttgaatcagtgctggacaaaggaccatctcatggaaaagcctcaccaagtacctccaaccaatcttccatcttcggctcaaatgccccctgctcatggagaccttcactccctggcacccacactccctggcacccacactccctggcacccacactccctggcacccacactaggccagtgccccggttttatgccattataaagcaacacatttcctctttgtggctcttaagtcagatgtgaccacacgcccagtccggcaaccgcacgggaggtctctccccctagactgtgctccatggggtggacccaggccttgtgctgtttttacttatatcccccatggagaccagagctaggcacagagtacagcagcaccccaactttcagccggttacccatacatctctcatgtcattaagaacaatgaaactatagcacacacacattccagtggaaaaaaataattttcaaagttccctggagttcgttgcagtggaatccatggcccaggtgagcacagctgcagggagctgcgcggggggagccgcagagctgggcacttgcgaattaagtcccggtgaccggtgactgccgaggctctggcaggcggagggcggggtgcggagatgccgttcagaacctcggacagcgccgcggcccatccggccagccagaagctgggtttcatctgttttcttggggactccaggattacggagtattgccatgataggggccagagtgctttatcccccaaagcaccccccaaaacgcggcacgggtgcaggctccggcctcaacacctgctgccttgccgtgtgatctggggtggagcttcctcacgtctctggggctgtttcccacaggaggaagaggtttagttcagcctggaaggagggcatcccatctgagccgagacctctttgagggtccttgtatgtcacctgctgtctgtcgctggttcgccttctggcatctttgatacctccccagtcagagacctctgtttgtgccaagaagtcatctgctgtgtcttcaaacaagaccgtaggaggcagagcctctggtgctggcacatcgcagaagctaatacctcgtcaccaacggagtgaagagaccacggctttcccctttccttcctgtattccagcttgcatggatgccagcagaattcaatctaaagtggaaagagaaaagtaaacaaacctgagaactttctggatctctgcagagctgggcactttgccagtacaggttttattggagggaagtggtgggttgcttcctcgtgttcccatcgcacaggctggagtaaactagctccgtaagcaggcttgcctttggccgacagatgacaacgtgtctgcatgtagacatagactttacaaagggctagagatggctggtggttctcatggggagatggccctgaggctgatcagtgtcattccagtcaaagggctgcctcttaggggcacgtgacatcccccagcacccgacctgcccggacaaccagccaccaggcagacaggagtgagggggtgaacgaagtatggactgaatccacagcctacctggacaacctcaccacgaagacaggagtgaggaggtgaacgcagtgtggactgaatccacagcctgcctggacaacctcaccacgaagacaggagcgagggggtgaacacagtgtggaccaaatccacagtctgtctggacgaccagccaccacgcagacaggagcgagggggttaacgcagtgtggaccgaatccacagtctgtctggatgaccagccaccacgcagacaggagcgagggggtgaacgcggtgtggaccgaatccacagtctgtctggacgaccagccaccacgcagacaggagcaagggggttaacgcggtgtggaccgctgtcatggctcacagcagcctcaacctcctgggctccagtgatcctcctgcctcagcctcccaaagcactgagacgaacatagacgcaggcacacatgcacacaggctgtgaaatgtatgtctccaagtggctgcgggcccctgaagggctgctgcagccctggggctttgctcttcagagccatgtcgagggagcagtagcgggagccacatgtgacccccagatccagacagagaccacttccagcccccaggaggcccacactcccctccactccacagcgcccccaaaggtgcccacgtctctgacccccaccctgggtgagtaggagcacgtagcaggtgcccctcacgtgcagctctctcatccacacatactcacacatgctcacacaggaaagcacatgcccgctgtgtcctgctgcattgctgggcagtgtccactgcacgtcgctcgctgcattgctgggcagtgtccgcggcatgtcgctctctgcattgctgggcagtgtctactgcacgccgcttgctgcattgctgggcagtgtctactgcacgccgctcgctgcattgctggggagtgtccgctgcatgtcgctcgctgcattgctgggcagtgtccgctgcacgccgctcgttgcattgctgggcagtgtctactgcacggtggacgctcctgcactcatggatgctcaggctgcttcccgttggacgcgattgtgagtgacgctgctgtgagcctccaggtaccggccttggagccagcaaatgctttcatttctcccatgcaacatctggggctggaatttctgggtcatatggtgggtgtatatttgactgtactagaaagtgtcaagcggttctgaagtggccgcaccatgcacagccccagacagtgtgagcgtccgctgcctgcagccccccagcactgcccagccagtctttccggtttgggccattctggtgggggtgaggcagcactgcacagggtcttatttccatttcccgaagcccatatgttttctctctggaggacgggggactcaaggcaccctccccgccccctcctgccttctccataaatctctccctctgaaaaacacaatcaataagccacagagcccaacatgcgaccgcaaagccgctccattattaagtctgtaattgctgagaattaatttgctaattgcacgcaactaatctgcgtcctttctgttttatatcaattaacagagtaattaaaaaaagcaatcttcgtgtcagctcctccctggcagacttagcctgccagagctaatgagacaggccacccttcagccaacctcattagtgacgaccgtgcggccaggaagtccttgatgtgcgatgtgcagtagctaacaagggcccccctgccgcgaagcaacaacttgctgggcatggagcagggacccacgggtccccatcattgcctccgggctggtgggacccacaactgtgccaacacaggggctttgctgggctggcaagtgcagggggccccagccaggcagtttcagaagagcaggcacgacgccaaggcctaggaaggaggccacagaggcccgagtatcccagggggtctttgctgggatctggcattgggtgcctctcccgctacgcagggatggagagaaaagacaccgagagtcctggggctgatgaagagcttgagctcggagcctgaccacccacagacagcagagtgatagacgcctccatgacacagaacgcagccctccctgcctccagcccacaaagcctcctcctccacagcccgacaagggccagtgctgggccagctgctggaggacagacagccacgccaggggacaccacagctcccagctccctcctgcgcctccccggccaccatgaggatggaagacagcaccaaggacgaagaagagagcctgagcagaggccaggacctgggccaactcagggaccaggcaagcacaccttgccatcttgcctgtcccctctgctgagcaggactattgctgggactggccccctccacagcacccaagccagccttgggcaaaaggtgctgtcatcccagctgacccctggtgccagcccggtacacaccagtgaggggatcaccagggaggcctggtgccagcctggtgtgcgccagtgaggggattgccagggaggcctccacacagactgacctcttttggtgctgggggaggggctgccactgtagatgctctcagctggggaaccttccccagagcaagctgctggatgtgcaggggccccgggcatgctgtccagcaggtcctcccaggctcccagctgcccccatccatggccttccgacacagccgccagccgctgaccgacatcaggtgcctgtgcattgctgggcccaccctccagcactgtcacgttcatcttagcaatggctcatgaggttggatggctcctgtccatgctcagccaaggatccactcagagcagttcagtggccttcccctggctgcagagtagagccggatggagttggacctggacgcaggccgcccccagcctgtgctcctggccaccgctcagcctgcccctgctgccaacacggtccgaatgaccactgtgtgtcccatgcgcctccacgggcccagaggcttgtgtgtgccaggctcagcacctcaggaccctcggtctgatcgctcgatgcccaggaagcccaggaagtgcctgtgtccccctcatcccctgcacagtcaccccaacacgagtccctgcaccccccttcctgacctccctcaccctgcacctttctcctgtaccctccaggtcctggcccctcccctcccccagaatgagcccttcaatttctcacccaacgaaagcctggccctgccctgaggcccccgtcaaggggcaggggcaggggctgctcccaccctcctgtcaaggcgactccattcctgggccattctccatcctcctccccaaagtcctcgcctcccgggcccaggctctgccacctgcctggctcagcctccagcccagccccccgccttccatctccccttgcccaccagagggtggggccccagacatgggctcttgtccctctggcctgcctggcccccccacatgcacacagggtgaggcggggcagggaagctgggccttgggtatccagccctggggaagagccaggccagggtgaggctgagggtgctcagctgccaggtgctcaggaaagcagggagcaggaaactcctggaattgggaattaagtgcaaggagaggggatgtgtggagctggcagcattctgccaagtgctcccccagagagccagctgcactggagcccacacgcacagagcccggggcgtggcactcatacacacgctcgtgtctgccttcacgtgtgtatatgagtgtggagtgtgcacacgcatgcttgtgtgtgcttgagcacatttgagtgtgcacctgtggctgcggtgcccaggtgcatgtatgtatgctcccgtgcaagcacatatgtgtgtgcattgggaggcaggaaccatgacgactgcacagcccagcacggcgcccccacggtcacccgccctgaaacgaaagggacccccaggtcacccaggctggagggtttccagttgctcccctcagggtcacttaagagtcaggcgagtccacaagacctgctactgcaaaatcacagcctgcagcatctcagggcctgtcttccaccccagcccattgtcattctgcataaaagcagaaaaaaaaaaaaggcaccaaactgcaccaagcgtgcaacagatgcagctcaaacaaactcgtgtacgacacggaagagacaaaagcgttgccggcaacttgtttgggacacacgtgatacagaaaggtgacgaaacatcacagatcagtgggaaaacaactaaactgcaaactgaagaatgggcttgggcagaccactcacagaagaaatcccaaaagccaataaatgacttgaaactatccagtgtcactattaaagaaatgcagatttaaataaagtttgactttcaaactagcaaaaaatgtatgaaactatgaagctcgatgcgtgtgatcatcagcagaggccgacgctgcaggcagggccaaagcttctgaccctggcccccagggaggaacccagaggccagtcagggaggggcagcgagctcacggccaggcagcgccacagcactggcgaccctcagggagaacaggcactacccagggctggatgcgtaacgggccccccggccacaccccaccgcccatcagagccgcagctcctgagaacgcatccggaggcaaggccaaagtcagccatggcacaaacatttgtgcatcaaggtcctgttgctctgcaacaactcaccacaaacagaggggtggaaacctccatgtcatcggacggcccagcggtcagaagtccaacgccatctccctgggctgatgtctgtgcaagcagggctgatgccgtagcttttccggcttctggaagctgccacagcccctggctcatggcaccatcctcacatcctctgaatccacattctcctctgaatctcccgcctccctctttccactgtaaggaccctgtgatgacactgcaccctcagaccctggtaacccagggtcatctttccacctcagggcgtctgacttaagcctgcctggagggtccctgtggtcacattcatgggttccagggttcagacacggccactttgtgggatcattactctgcctaccacaccatgtggccctgtgtgtgttttcagggggcatttgcgcttatatgcaaataatacatatatgaataaacgtgtgaatggtggtcacgtaggagagggcatctgtatggggccacacctgtatcttcgctgtgctttccacttgttattttctaaagggtggatatgatcttacagaggatagctcaacgtccagttgtggaaggagatgggacgagggttggatttacttggaaacacaatggtgcccacagagcagccaggactgaacttggcctggatctaccctgagcctgctcagtgcagtaggggctggtgctgctgtggctccatggtttcaagttaatttttgatccatttcaagttaatttttgcatatggtgtgaggtaagggtccagcttcattcttttttatgtagatgtgcagttttcccagtgccatttgtttgggactatattttaattaactatttttttttgagacaggaggaccccttgagcccaggaagctgcagtgaaccaaggtcatgccactgcactccagcctgggtgacagccaaacctatctgcataaggtggtccctgagcacagccgtggtttctgcaccatggtggcccttgtccctcagcctgcagtggacacagtggatgttgtccccaagctcctgttgtctggagcctttctagacacccgtgacccatggaccagcccagagacctcaagggtcacggcaacaagcgtattgtgggaagggagggccgagatgacgccggctgcagagactggccagagccagagccagatgctggagagtctcatgggtcccaaggtgcccacagggcagaaaagcccacacgtggtgatgggagggcgacctggaccacacacgtgaactgacgctcagccgcagagtcctggggccatcacggcagccccgcaagggctctcaaggtcctggtttcccaatggtcacaccgaggcagagaaaactgaagcgtggaccactgtggcccgaggccagaccccaacctcgccgggcttggaattaaccccgggtagatggcggcacgggcttagctgaccttttccaacgtctcatcagccccagggctccttgctgttagggtctccaggtttagcaaatgaaaaaacaggtgcccagttaaatttgaattccagaaaaacaagaaattcttttttttgtatgtgtgtgttttgttttgttttttgtttttttgagaaggagcctcactctgtcgcccaggcgggagtgcagtgattccatcttggctcactgcaaccactgcctcctgagttcaagtgattttcctgcttcagcctcccaagtagctgggactataagcgtgcgtcaccacgcccggctaatttttgttttagtagagatggggtttcaccatattggccaggctggtctcaagctcctgacctcaggtgatccacccagcactttggaatcccaggtgtgagccaccgtgcccgacccatgaaattcttttttcatataaccacatctcacacctgcacagggcatccttcatgcaaacctcggggtggggccggcgtcctattctccagcgtctctgccccaagtcgagtggatgagacaggacctcccagctcctcctccctcccaggtatgtttagcttgtcattccacacttacttgtggcaggtggctgtcctcagcccaaggtcacgtcatgaatattctggtttgggcgtgggagcctggggatgaatcacaggccagattagcagcccctcaaccctctcgcaccaaatcaagggccagcaggcctacgtcaacgtaataaacgtaaaccccttctctgccaaaaaagaaggctggatgagtcctccctgagtcacccagaacatctactagtcacagccagttattaactcccttcccgggagccaccgctgcaggaacatggcagcagggcagacatggatggggctggggccttggtccccctcccggctcaggccactgcacagccgtcctgccccaaggccctctctacatgcttgatgggcgccaccgggcactggggggcaggaggcagaggagggaatggaggtgagccacacaggggggccggactccagagcccaaggaagctcgcctctggaggctttgttacccacatgttcctgaggggccctgccaggaggaccgtcccctgaagggagaggaggcctcagacaggccggggatgcccaacacagctgtggagccatggaaattacacaactcagtaaatcagaacaaaacccaaggagagagacgagcaaaagtgagaaaggccaggggagaggccagcggcggccactgagggctgtcaggatgaacgcaggccacaggctgcagtgtggagaatggagagaggccagggaggtcaccgagagtgaagtatttggggagatagcgggaggcacgtcccaccctggagccatctcgccgggcctctgagagcgaagtgtttggggagacagcaggaggcacgtcccaccccggagctgtctcgcctccttcaggactgtgggtgtctgattctccacggctctttaaacaaactgaacctagaaatggcaccagcaccaacagacttggctatgtttcgtgcagtaaagagcgggcaggtgggccttggcatggggctcccagcaggagggaggcagcaccccctctgcccttctgctctgctggacagggagtgggcaggctccgtctgcatctggtcctcctcacaccctgggagctggttctgtgatcatctcctccttgcaggcaggaagtggggctcagggaagccaaattatctaagaccacatggttgtgggggccgggctggggccgaggtgatgggtctggtgggctctgctcctgggactgtctctctcagcctggccctcagagctcccctgaggccttgtctcggtccagggacagccagaggtggccaagaagaagggttccctccactccatcagcctcgtaaaaagagcctcagatgactgtctctgtgtttatagatgcgttgccccaggatgagagatgcaattctctgaaaggaagcaaatgcgatcattatcctcttcacccaggcctctttgctggtgggaggttagttttgcgtttaatgaacatgggctgagtctctctaatgaggaagagatgggtgcacagtgattagaaacttggcagagaaagaagccatcacagcttctgtggggaggagccgctgggtttgccgtatctgcagactggcaggagggctcacagcaggcaggctgcacactgatctctgagacccccgcaagcctgaatcccctcgcctgctgccccaggctctcaggaggacaagtccctgggtttgtgggcgacctttggttgaagctggggggcatccacaaaaataaagcaggtcagaaaccgtcctgagggctcccgcagcctcagcaacccaggactcttccgccccacgggactcttgtcccacagacaggtgaggcagatgcaggtagccacccacccaagcaccctcagccagcagagacgcaggaaaatgtttctgctccacatactccgttgaaatgggccccactgggagagaacttgcacttgacctgggaaccacagagcctggaattggcagtgagcttggtggtgcacggtgctgtgaacgggggcctggcagcagcaggtagggctggcgcattcctgccaaccctccggggggaaaaggcccaggaacaatggaatatgactcagcactaaaaaggaacgactttcgagccacaggaaggcgtggagaaacacatgcatgtcactaagcgacagaagccagtgtggaaaggctgaggggaatgtatgagtccagctataggacattctagaaaaggtgaatccctggagacagtggagagaccaggagtggccgaggttgggggagcagataatttttagggcagtgaaactgttctgtatgatacagcaatggtggatacctgaccttacacattgtccaaagccacagaatgcacaaggccaagcgtgcgctcaggtgcactctggactttggtgaatagagatgtctcccctgtgacaacgtcccacaccaacacaagaggccaatcacgggggaagccgtgtgcaggggagtggggaacaggaaactctctgtgctttctgcttaatttatgtgtaaacctaaagccacaccaaaaaatcaagcctattcgtttttcaaaggtgtaggcgacaaagcataaatgaagaaactctgtcaggcagaatgctcatgccaggtgccctcccgatggagctgggcatctgtgcagtggtgacagagacctgcccctgagaatggagctggagggtccacgggtcagtgtcctcacctgcctgccagtgggcccgcggatcagtctcctcacctgcctgccagtggcactcatctctgaacataaccataaaaatcacattccccaaggcaaacagcaaagcctcggccccatacgctaccgtttcccctgaaaaatattttgtcaagtgaaacatttgagaaattagcaaattttccacttccaagatcttgctgcaaagtgatgatgcttcattctgcccagagagctccacaatcacctccctctgaaagcccccctccttggagcctcctggctcccacacagaggcaccgtgtgccagggactgggccccatccggaggcagcttggactccacgtttgctcattctgccaaaaagaattcgtggcaaataacgttcacacaagcacagccagcggtgggcagaggtgggtgcctgttggcttgttttaattttttaccatttttatcatggaatatcatatcacaggagaaagtgcaaaagtgcgtgtgtctaagtgactatgaatcagaggccaaatgttgtcagccctctaggggccctctgcgtccctccctccagagaggaacgccatccatgtctttcctatcattgttcctgactttatttttttcctcagttttttaattgtgataaaatatacgtaacataacgtatatgaccattcatagctgaccattcttgccactcataagcacccagttcaggagcatcaaggacattcccatggctgtgcagccgtcgccaccatccatttccagaacttttccaccttcccaaactacagctctgtccccattcaacaccgactccccatcccctcccctcaagcccgggagacgcctgtctatcttctctgtgaatttgatgactctcgtgtttcttatcattggaattccagttccagtggaatatgcattccattggtacttgtccttttgtgacgctcatttcatttagcataacgtcctcgagcttcatccgtgctgtcaagggcgacaggctccccttcctctttaaggctgaatcattttccgctggatggacggacacattcgcttctccgtccatctgtcgacggacacgcaggtggcctccaccctctagcccctgtgaacacaggtgtgccagtattttttcatgttcctgcttccaattctctggagattgacccaaaaggggggtttctggatctctgctttcttttacctctttatatgcctcctagataccatagtctgcagctttgcctgttcgtgaactctctgtaaaaggactattctcagtgtgttcttctgatttgctgctttcctgccatctcagttctaaactccgtcctcactgcacgtgtgactcttgtccacgcacgtttgtggctgtgtcgcgttcccggcgtggccacgccgccacgtattgatctgcccgctgcagacacctggcctattttccaggactctgcaggcaggggcacccttcgccagagtgtgtgcagggcctttctgtagtgccctcccccagaagcacatgggcccgtcggcccccgcgtcctcggacacgcaatgctgtcggtcgttctaaccgggctgtcctgacgggcgcgcagcggcatcccacggcagtgttcacgagtgttgccccgtgtgtggggaggcgcctgttcagctgtgccacccgtttttctaaggagtcctctttttcttgctgattcagagtccttcatattctggttttgagttcctgtgagttttatgaatgaccgcaccttcaccctctcccgtgtcttctgagaaacaaagtcatgtgtgctgatgttacccgcttccgctgcagcaaaggctcttgggggccttgtctgtgaggtcatcaggatggggctctgggtcaaaagtgctgccctctgggcatccacctggggggatctgaatgccgtgggagtctactttccttttttcccacgtgggcacctgactttcctggcaccagaacaagagtccaaccttcccccaataacctgcaacgccactcccttcatcacacatccgcgtgcgtgggcacgagcacaggcccccctcggtgcccaggcggtgtcctacctcgtgggtcagcggccaagccccccgccagcagctcctcgtgctctgggcaactgcggccccataacacgtcccacttgccatccgctgttgcaccgtccacctgctcctcaggagggtctgggctgctcccagcctttctgtacttctctgtacattttagaattggcttctaaaatcaatctctctctctcactctcccccactggactttgctggcactgatgtgcatctacagacagacccagggaaaatggtcaccttcctaacagcaatctttccaatccatggaagggatgtctcaggtcttcttcagtgtctccagatttgtgggtttgccataaatgtgtcacatttctttgctgtttactctggtgtggttcatagtttgatgttattagaaatgacgtttcctacatttattttctccctttttgtggttaatgccctgattttcttacactgtctttaacctagaagcgtcaactctctcgccaatgcccacagtgcaggtcactggggacccctgagcacagccaccatcccccgggacagcgttattccccatccccacccccgggcccccactttctcgccctccctaaccctgccctgctcctggggtgtggggtgcaccctcgttgcctcccatcatgtgaagcctccttcgtcttccaggtgcactgtgaggctttctaaatgtcctaagtggaagtctaatttatggagctcttttctgcacccatgaagagaatgagactttccccctccaggtgctgctgtggtgtcaccgtgatgggttctatcccctcaaggtcctgctgccatcggggccacacctgaccatttgctcccgacttggggcagattccttggggctggagtgcaggagcctcaccgccaggggctgccacccccaccccggagggctcactctagggctctgggtctcaatccccagagaagggtgcgtgggactcctcctcactcacccactcacctttccaaccaaagccgtggacaggctcagatcactgtccacacccaacaccgcgcttcccgtgtactctgcccgtgtggtcagcaggggccgctccctcccctcccccactcgccctcctcccctcctctcctccccccgccccctcatcacccacccgcccgccaccacacaatacggttcctttcattgtcttgtgttaaggctctcgggtgggggggtggttattactgtcccactgtgtgacatcataataggctgctgtcccagaaaacaaaggctttcgaagatggcgaggagacacgtcctatttacgtcgtcactgcctagacagacgtggaagtgcgggagcagaataaacatctgtatccggagagtaacaatagcgctggctgccctgttatttccgaagcctgcctaaattatgccctgcgcagcacagaaagggattttttgtgtatgtgcaggtggattaataaaaaaccattgaaatgcaaagtgagggctcctccctcacaccccctccccgagagaagggaatcgtcacccaagaactcgcagatcctcttggggacacataggccggggtcgaccgtccgcaagcacgagacccagggctgcagggggaggttccggctgctgctgttaccgtcttgacccccaaaagaccaaaaaagggccacgtgcaaatcgtaaaaatcagatgtgaatgaaccacacggctcgcaagggtgggaggttcatgccccagcccaggggtctcccaacacctttaccattggcacccctgttttggaaaaataacacagacgttgttccactacgtgggaaatacaccccgtggctgaactccatggcttcacccgcctccatcgttgggctggcaagtgtggattggatcacaatgcccacctgagaggaggcctgtcgggtccccaagctgcccctgggccgggccacccacacagcaaggggcaggggccgcctgaaagcaccctgtgctccggcgcggcccagatgcatgctctgttcaggtggcgtagagtccttctgcctcggtgtggccccagggtgggtgcagctcagggaggaggcgcagtgagtccttccctccctcggccgagcagggctttctgccgaagaaggtgtttcccgtcagcgatgaagaagtaagttcgatgctgtggaaatggattctctgattaaaaccaaaaagcaaatccagcccacccggccatgtgcagggctgtctcccacataacctggtacttggtggtggacggaggagcggcctcaccagagcacagggtgggtgcagcacttgctgctggagacgctgccccgtgtgacacggggtgcacggaagccccaccgtggaagtcacggctagttcctgccagcagcgagtagcagccagcatttaaagacacgcctgggggttgagcccaatttattgtctttattaaaaaggatattgtagtagcctgttttcacactgctataaagacatacccgagactgggtaatttataaagaaaagagacttaattgactcacagttccacatggctgaggaggcctcaggaaacttacaatcacgatggaagggaaagagacaggtcttacacggtggcaggcgagagagaagagtgtgtgagagtgcagggacaactaccatttataaaaccatcagatctcatgagaattcactcattatcgtgagaacagcatgggagaaactgcccccgtaatccaatcatttcccaccaggtctctcccttaacacctggggattacaattcaagatgagatttgggtggggacacaaagcctaaccatacaggtatcaagtgttccatgctgccctttgttgaaaactgacttttatggccctgccatgtgaccatgggtgacaaatgctattccctcccagcttggggccacggtttctccagcctgtacattaaagcctcatctgttcttcctccccaggcctggagggctcaccggcccgtgagccctgtgacattacttcccctgggcagactcagggcaccatgaagcttcccaccgggtaggcactcactatgtctgttacgccgggcgccggcccgagtcctaaagataggcagccctgagggcagaggcactcactggagctcgtgcacacacgtgcacacacgcaaacagccgggcatgtgcacaggaacacaagcacacatccacacgtaactgtgtgcacacacatacacacatgcacaatccccactgtgcacctgagcatcattgtacacatgggaaatacatccacaaacacacacacccataaccaggcacatgacccggggctgccagtgccagagtgatgccagctgcgtaggccacacctcagtctgacatataccttcctggttcatcagccccatgaggaccccaactccaggatgtacagcagaaaggagtcttcacctgcttcacagattaggacaccgaggctcagagagggttgagtggctgcctgaggtcacacagcaggcaaggcagggaacggcactgctgcccctcattttctgctgaggaaaaggtggacggggtgccagccgcagtgaagcccacaggcccccaggtgccacctatcttcatagcctggcttatcgtcaccccaggaggaggaagggccttaactatggcttccacatcagatgccagcccaccctgggttaagcatctgcatggagcccagcgatggggacgcgatgaccacgggcctcagaagcacccacagcctcgaaggggccaggactggctgcacacagcgccagtgacgacaactgctgctggcggggaccggacgctcaagccccagatacactgtagcacgtccccagagaagctggactcagagctcacacttccctagagacgctcacgtccaaggcaggatgcaggtgtgcagtgcagagccgctcagagcacctgagctggtggaactggccgggggtccagggtccactcaaggacgttctccatgtgcagctgccagtgactcctgggggctgccgggcctgatccagtgagagggtggcctcccccaagactagtgcagtagacaaggccctttcccgtcagccaccggagcgagctcactgagcacaggccatctccagggcggtttcagaccttccggcccctttcagggacagccaggcctttgtgcccaggaccgctgccctccagacagctccctgtcatgttcacgtccagcgctggctctgcagacactgggggccgccttcactcctggggacccccttccctgcctcccgcctctctccaggcacctgtcccttagtacaggagctcacagctcaccatgctgcccagcacccaggctgtaccgcccacagctgtgcaggcactcacagccaagtacggagccttgcggaaattcccccagatcctggcccttcacccacacagatcggaccctcaggggacatcggccaccaataaaggagccagcctagatgtcattgcagctgagcccccatggccagctcctcgggtcacggcagctccatagcaagggctcctctcatcccaatccactggggccactgccaagaggaggacacagccttggccatcgagggggatgctcaggtaccaggacccaggatgcggacagactccagggtctccaaggttcctgctcagaggttggcagggtgcttgtctccagaatgatgcccacctggcgataagtctcagcagagccccctgcagagtggccctggggctgggttcggccccagacgacctgaggaagctgccaggtaacaaagctgtcggcatccccagagcccagcgggcaaagatagccaagaatctaccaccaactggcagccaagattgcctgtgggtcatgcagcaggttcacgtccctgttttaacttttaagaaaccaccttagtaaaggttgtactgataaaccgagcaaagactgggcccgtgcccctgccccagcggactacagcctgaaggaggggccctggaaacccaggagctcctgtgccagctccgggcacttgaccatcgcccaccaggtttgtcccctcggctccttccttccgtgcctcacggtcggccttcgccttgacgtgcatgccaggatgcatgaccactgggcaggcaagtgcacccctgggtgcggcaggaagaaatggccccttgtaaatcccacaggcgaggaggccacactcgtgcgggggtggggcccacagagggaagcagggccatagaggaggcggggccacaggggaggcagggcctgaggggaggaggggcctggatggggaggcggggccccaggggaggcggggccttagaggagacacggcccggagaggtggcagggcccagaaagaaggcagggccacaggggaggcggggcccagaggggaggcagggcccagagaggaggcggggccacaggggaggcggggcccagaggggaggcggggcccagaggggaggcgggtcccggaggggaggcgggtcccggaggggaggcgggtcccggaggggaggcagggccacaggggaggcagggcccagagaggaggcggggccacaggggaggcgggtcccggaggggaggcgggtcccggaggggaggcagggccacaggggaggcagggcctagaggggaggcggggcccagaggggaggcagggccacaggggaggcggggcccggaggggtggcagggcccagagagaaggcggggccacaggggaggcggggcccagaggggaggcggggccacaggggaggcggggcccggaggggtggcagggcccagagaggaggcggggccacaggggaggcagggcctgaggggaggaggggcctggatggggaggcggggccccaggggaggcagggccttagaggagacagggcccggagaggtggcagggcccggagaggtggcagggcccagagaggaggcagggcccagaaagaaggcagggccacaggggaggcggggcccagaggggaggcagggcccagagaggaggcggggccacaggggaggcggggcccagaggggaggcggggccacaggggaggcggggcccggaggggtggcagggcccagagaggaggcggggccacaggggaggcggggcccagaggggaggcggggcccagaggggaggcgggtcccggaggggaggcgggtcccggaggggaggcagggccacaggggaggcagggcccagagagaaggcggggccacaggggaggcggggcccagaggggaggcggggcccggaggggtggcagggcccagagaggaggcggggccataggggaggcggggcccagaggggaggcggggcccagagggggcggtagccccgccaagtcttgggggcctctcttgctgccaagcaggaggcctgggctggctgctctgtctctggaatgcgctgttcccaccacttggcaacgcctcagagggcaacacggccctgcccagtggggagagggctccagctgcccaccctctggccctgggtaggggaggatgaaggtggcctggcttccccgtaggaccagatgccaaaaggtaactgtcccctaaagagcagtgagggcctacttgctgatgaaaagcctaatcaagacatttttttgagacggaggctctgtcgcccaggctggagtgcagtggcgtgatctcagctcactgcaacctctgcctcccaggttcaagtgattctcgtgcctcagcctcccgagtagctgggagtatcggagcctgccaccacacccgggtaatttttgtatttttagtagagacaaggtttcaccatgttggccaggttagtctcaaactcctgacctagtgatccactcacctcggcctcccaaagtgctgggattataggcgtgagacaccacgcccgaccctaatcaagactttttaaaaacatgaatcaaaaagacacactttaattaataggcagtgaattaaaagactgctgactttggaaaaatcgttttctgagttcaagatcggtgacgctggattagcctaattgatctgaacttgttggtttgggattcaagggcaagtttggttccttagtggctggctgtgttgtgtccagattgatgttcccaggtggggggcaggagccctggaaacaacagccagaccctgggcagccggccccggcgaagaggggtccaagccctgtctcatgtctcccttggggtacatttgaggcctggacaccccaaccccgggaggtggggagtgggtcaggctggatatgagcaatgacactgagaagactcaggggcctcgccagacactagccccaggaggcccggcggtgtcccaaaaactggccatctgttagacaaaccaaaagaaactcaaaagaggtaaacagtacaaatctcactcgatcaaaattaataaaaatagaaataaaaattccccaatttattttaagttacatgaccaagaaataagtaccccatgcctaggagagtgggtggggtttggccaggctgagctcagggaaaggtacgtggccttgaacttcatattccagatgaatattaagatgaatggaatgaatacagtcgcccaagtcattcaagaaaagtaacaaataaagagaagatggggaaaagtcaaagctgatgaattagggagaaaagctacggaatttgagtccaacaactggttctttggaaagttgtaagaagtgagtgttccaatcattttcctggtcaaaacattcggcctcactggtggcctgagaaatcgcttaaatgtcatcagagtagaacagaaatcagggcaggaaagagcatgggcagagagggaggggagccccagggcgtctccggtgcgctcagacacaggttcaatatgtaaaacagtgttattgagctgtcgctcacatggtataccagtcgcccatctacagcacacaactcgatggtctgagtgtgttccttcacagagttgtgcaaccatcaccacggtcaattttagaacattttcatcacctcaaaaagaaaccctgtccccattagcagtcactccccactgcccccaccacacccccaacccctggcaactgcaaatctgtttcctgtctctcctggtttgcctgttacagacatttcccatcagtggaatcacacaatatatgttgttttgtgtctagcttctttcatttaacaaaatgttttcacggctcacccgtgtggtagcatacatctgtgcctcattctttttgatggcggcataatattccattgcacagaggagccacattttgccagcccgttcatcagtagacgggcagtgccttgtttccacttcttgactatcatgaataatgttgctatgaacattcatgggaaggttttatgtgaaggtatgttttcatttctcttgggtacatacctagaattggaattgttagataacatggtaattccatgtttaaccattttgagaaacttccaaactgctttccaaagcagctgcaccatttcatatccccaccagcaatgcatagattctgaacttctctttccacaaacttttgttattaaaaataaattgtttaaagaagggaaaaaacagctctccataataaaacacactgctcttctgaaatctcccttggcgtgtgtctatgagttgatttacagtgtgggtgcaagtccacaagccagcagacacacagggccacagaagggacactgccatgctggcccactaccacgttcacaccgaaggtgactttgcctggctgtggactcagcgaagctgggacaccctcagaggcgactgtccacccaaccctcaccatgcagagacagagaccagcacacttggtctcctccacccagataagctcttggagaggtggccctggcacctgtgaaaatgtaaatggctgtcggcctttgacggtgctgctgacgggtgaccagagttctctcgcggctgcacgttttcccatgagcgccgaggcaggttcaatatggacagctcctccagcccctgcaggtaacccagcccgagctcccacttcctttgtaccaagcagaaacaagggcatggaaaagggaggggtgttttcacatctgaatggcaacattcccgtccaacaccccggactatatcttcaaacagatctgtctgagaagacagtgattgcattgagcccagcgtgctgtcagctgcttgaagccagtttcggcacacgggtattaggttatagaagaaaccttgttgtaaggatcgtcagggaggaagtcactgtatttacttgaagtttgcacagcttcatcagtttcagtggaaataactaaaaatagttaaagacattagttaaaattaaagaaaaggggacgagaaaacaagctacagcctgagagaaaacatttacaaaccacatgcccgacaaaagactcacagaatatattccttaaactctcaaaactcaacagtaaaaacaaacaatcaatccagtgagaaaatgggcagaagagacatttcaccagagaggctgtacacagggaaataaacacaggcaaagacatctaatgtcctctgccagggggaactgcacatttgactcacgatgaaatgtcactacgcacccatcagcatggcggaaataaaaaataacggcaacattaaatgctaacgaggtcatgaagaaacgagatcactcatacactgttggcgggaatctaaaacggggcagccacggtggagacggtgtagcagtgttttgcaaaaccaagcacgtgctcacctacaacccgcaactgcattcctgggcatgcatcccagagaaaggaagactttcattcacacaaaaccctatcacgattactcatagcaactttatttgtaaccacgaagaaccagaaacaaccacatgcccaacaatagatgaatggctatacacgctggggtgctgcacaccctgggactccactcagctgcagagaaagaaccggtgaagcacacaacagctctggcgggtctttggggaaagaccaccgtctaccgccacgcgagggaaagaagccggtctccaaaggtcacaccctgcgtgatttcatttctgtgacattctcaaaatgacgaatttggaggaggttggagtggggaaagagctggaggctgtgactaaaaaggatagcaggaggaagatctttgcagccgcagaggggccctatatcttgactatagtggtcacgcgtgtgataaatggcaaagagcagagacgttgtcggaggcacgtcctggttgcgaggccgtcctctagtggagggatctgggtgaaggatgcatgggctgtctctgtactactgtgtctgtctttgcaacttcctgtacatctacaatcattgcaacagctgcagtgggctccggtgggcctgtactccagcctacgacagagagagactctgtctcttaaaaactactttatttttaaaatggcagcaggcgttgctttgcctcaggagagttggacgccgagcccttttgcgggtactcaccagaggcatttgtgctgcttggggtctgggcaccctcttgttgtggtgactgtgattcccatatcattttatctcacaacgttatgaaaaaagcctcattgccgtaacagcacagcaagacagcaagcaactgcgatcgccttggcagagaaggagaagcaaggaaaggagaccagagcagcgctcgtacctctgaagtcctctcccgcaatgcgacgtattagcccaaagtagaccgtggctatggccggggcggggcagctctgtttgtgagcacggaatcgaggctgggagctgcacactcacctgagcgttcacaaactcatcgtggagggtgtcaaatgcactcacggctgcgtgcacgtgtctgctgccttctctcagggagtacagatgctcccctatgctggggcttcaccttgtgtgtggaggaaaacactgtgggaactatgttggtgctgattttttttttttttttgatacggagtctcactctgttgcccaggctggagtgcagtggtgtgatctcggctcactgccacctctgcctcccaggttcaagtgattcccctgcctcagcctcccgagtagctgggactacaggcgaacgccaccacgcccagctaatttttgtatattttagtagagatggggtttcatcatgttggctaggctggccttgaactcctgacctcaggtgatccacccacctcggcctcccaaagtgctggggttacaggggtgagccaccgcgcccagccagtactgatttttaaatctatctgttcaatcatttcggctggagccatcattatcttgctgaagcagctgttggaatattaacaagaggcagtggtaacaagtggaatgtaattagcactccttgttccagtgaatttgcagttctaactgggaacaatttgcagtgagtttgtgtgtggctgtaattaacttcgcaagcacacaggcagcacagagcccatgggaccacagcccgggctgtgacctgcaggctgatccctctgagtcgcccctgagttcccaccggctgctcccgtgcgcgggtgcccctctctcagcctggcatgtgactgcctcctccaaacacccacctggtgtccaccattctggccctgccagcagctccttcattccatcatttatcccagtgttttccaagcacccaggatgcaccaggctgggacttgcccccagtcccacaaagctctgcactcctgggttccccagtaccccccaggaagactccatgccacacaggtggcaccaccttgctgggctcacgtggggaaaggatgagagagccgcccacctgggcagacaggtgcctgagccgggtgggaggtgggaacggagcccaggaccacacagggggtgccgaggagcttgcacacccaggaggctccctggaagaggaaggtttcaagcagctgccctcaggcaccccacgcgtgttgacagccaagcgtgacttcttgtcaagggcatcgttaaaggagaacatgaggcctgctcgggggctgagaggagagaggtgccagggcaggcgccccccgcacataccctgccactgccatgggatcccggcactgcagcctcctggtgaggcccatgtccagctggggttgcagagggtgcggtggcttcacaccccggattgaactcaccaccctcctctttccctcaagctttggtggctggagaatgacagtcgatggccagtgcctggtttgcagaggccgctcatcagcgtgaatccccctgcgtggtcagggccacctcccctttattgatgagaaactgaggcacaaatacattcagtgcctttagtgagtgtcacgcccagagggtgaccacctgccaaggtggggcataatgcacttggcttcccagcctgcagatgctggactctcacacagatggaccggacggaccggagcccgaggtccccagcgtgagacccattgttgttcttggcagtttattttcacatctttcccggaggcccagattcagcggttcttagacttaacctaagaatctctcaaaaccatgtaataaaatactccatctgcatagattaatttacttgcaatgaatacacagacttggagggcacaatcctatggccttttacaaatgtttacagccatgtgacaacaccccactcaaaatacgcaacacttcatcaccctggaaagttccctcatgccccttgcccagccgccacctaacccccaacaaaccaggcaatgacgttctgatttttatggtcagggagtagctttgcctattctagaacctcaagtaaaggtgattacgtagcgtgcacttctttgggtctggcttctctcactcaacatgatgtctgagagacgcctgttctggggtgagacgtggttctcgccttgttcttgctgagtagtattccactggacggacgtggcacaatggtggcgtttccattcaccatcagagaacacggagcttccttcccgattgaggataccacaaataaagctgctgtgaacatccacgtacaagtctttttgtgggtatgtttttattgctgttgcatgaacacctaggaatggaatcgctggatcctaagggaggtgtttgttttattttatgagaacgaccaactatctttcaaagtgatcaaagtgccttacactctcaacagcaatggattagatttccacttgacggcaggcaggatggccaggcatgtccgcctgggtcattctcacaggcacgcatggccccttgctgtcgttctaatttgcatttccctggtgactaatcgaaaggagcttttcatgtttgtctctttgttatgtcttacagaacctacttctgtattctgcatataagttatttgccaggcatctgaagggacttcaaaaagttcacggaaaaataaaattagaagataaaaataaaaatataaactttatttctcaacataagctccaccaaggtcaagacacttttgtaagtgatgataccagccatttagtccatccctaaggcactgagggtcctgggaatttaaccatctcaatgcagtctttttacattactaactgaagaaaaatgactgttctttaaaaataatttttaagattaggaagaaaaaagccagacggagccaaatcaaaactgtaaggtgggtgccagatgcctccagcatccccaaaacttgccataaccttggctcttgaccagtccacttttgctgtgacttgagcacctccgcctctccatagcctttgctttgattgggcctttccgcctctctgtagccgttgctgtgacttgagcacctcactctctccgtagccgttgctgtgacttgagcacctcagtctctccgtagccgttgctttgattgggctttgtcttcagcatggtactgggaaagccaagtctcctgttacaattcttcaaggaaatgcttcaggatcttgatcccacttgtttaaaatttccacggaaagctctgctcttgtctccagctgatctgggcacaacagttttggcacccatcgagtggaaaatttgcccaactttaatgtttcagtaagaattgtgccagctgaaccaactgagatgtctatggtgttggctattttttctgctgttaatcgctggtcctcttcaatgagggcatgaacaagattaattttttcctcaaaaactgatatggatagtctgccactgaaggcttcatcttcaatattgtcttgtctcttcttaaaacaggttatccacttgtaaactgctgatctcattgggacattgtccccataaactttttgtaaagtatcaatgatttcacattctttcacgaagcttcttcattaatttggtgtttcttctttcttgcttcaattttagcagaattcatgttgctccaataggagctcttttcaaacagatttcttttttttttttttttttttttttttttctgagatggagtttcactcttgttgcctaggctggagagcagtggtgcaatcttggctcactgcaacctctacctcccaggttcaagcacttctcctgcctcagcctcctgagtagctaggactacaggcatgcgccactacacccagctaatttttgtacctttagtagagacggggttatatcatgttgcccaggctggtctcaaactcctgacttcaggcaatccacccacctcggcctcccaaagtgctgggattacaggcttgagccgctgcgcctggcccaaactgatgtcttatccttcttagtgcctcacaccagatcctgttcagacatgttataacaaattagtatgagtttatttttgcacaatttttgacatctatgcatagtttttcacaatacacattttccttaaagggtttgaggacccttttgtgtgactgcagacgcttctacagtctgtgacttgtcttctccttttcctaaaggtggctttgatggtcttttaaaattttgattgaagaacaacttaccaatttaccagtttgggttaattttgggttaacgctttttgtaccttttctagggaatctttgcctatgtcaagatcaaaagcatgtcttggcctagttcataatgttagagggaagctgcaggatttctgtccatgcccttcgtgacacggaggtagatccaggtaccagtcgaattgaaattttcggtctgcatctgtttagatgatcatatagatttctcctttacgttaatatggtaaaaataaaatcactgatttttgaatattgaaccaatcttgcattctagagataaatattcctcggtcataatgcataatccttgtgttatattgctggatttgacttgttaatacatttggccctccatatctacaggtttctcattcacagattcagccaacctgagatggaaagtattcaaaagtaagataaataaaaaatgaagatacaaccataaaaaataatacagtataacaactatttacacagcatttacattctattaggtatataaataatctagggatggtttaaagtatatgggtggatatgggtatactatgcaaatacatactatgtgcaaatactgtgccattttatatgagtgacttgagcatcattggattttggtacccacaggggctcctgaaaccattcccccgcatgtgcatgtcaagggactgtaaagatggtctctgacttaaaatatttttactttaccatggtatgaaagcgataccggtaagtgctcaacttatgatggagttacatctggatgaacccaccgtaagtcaaaaatcctataagttgaaggcttagctggacatagccctatcgtaagttgaggagcacctgtattttgttaagggtttctatgtctttgttcataaggaatatttgctctgtaatgtcatttacttggaatgtcttcatcatcaactctggtatcaggattatgctggccttggtatgcaggagccaactcaccatggcccccaggggccaactgtgtgcatctctccccacctcacacaccagtgtcacgttggtagtgacgtcagccatggtgcaagtatgtacatcactggaattggcaaacactgcaaatcatacgtttcccccagaaagctaattgttaaatatttaccagtgaaccattggctggcctcataaaacaaatcatttttcttcatcctctattttctgagtttgtgtgagatttataatatctcttccttaagtgtttgacagaattcaccagtgaagccagctgtgcctggagtcttccttgtgctaatgtctggttgttaggaattcagtttatttaacagatgtgggtctattctctttcttctcatgtcagtttttgttagttgtgtttttctagggatttttctattttatccacattatctaatctattggcataaagttgttcataatactctcttattacccatctaatctttagaatactattcctgatgtagaaaatgtgtgttttatcttttgttcttgatcactcttgctaagggtttatcaactttatttatgttttcaaagagctaacttttggctgtgttttctctattgtttgcctattttctgcctcattgctttcttttcttaccattgtttttctcttccttctacttgttttaagtagagttgagtttaatttgctcttattttcctatcttcttagatggaaacttaaataactgattttagacattcagacctttctgcttttctaatataaacatttaaagctttcttgggagcactgctttagctgtatcccacaaattctgatatgttatatttttatttcatttcactagaaatatttcttggcttccattatggtcttttcttgaccccatgggatattcagaagtgcattgcttaatttccaaatattgagggctttcctaaatatcaaataaatttcttagttaattcttttgtaataatagaatatactcttaaagattccaaacttttgaaatgtattgaggcttatgttaaagtataacatatgatccgtcttagtgaattctccaaatatttgaaaaaaagtggatattctgcagcatttggtgtagggttctattaatgccaattaggtcaagttcattggtggtgttatctatatcttattactaatgttttgtctacttgttctatcaaagactgagaaaagggtgttaaaatctccaactatgattgtgagtttgtctatttctctctttaattatgtcagttttgtgtatggtcacatatttttaaattctcttattatgtgctacatatttttaaattctgttattatgtgctacatatttatgactgatgtcctgatgaaatgggccttttttcattgtgaaatatacctccttatctctgttgatgctacttgtcttagaccccaccctgtctggtatggatgcagccaccttggctttcctgtgctcactctttgtgtcacacgcacctgtccatctttgtaccttctaccaccctgggtcttccaagtgtgtctcctgggcacagcatgctgtcgggtcttgcttctttgatccagtgtgaccatttctgcctctgaacttgagggtataatccatctacatttgatacaattaggatacgtatggttcagtttaagtctaccatcttgctatttgttttctttttgttccacatggtttttgatcctatgttctactcctatcttcttttgggtaaataaaatgttttttagtattttattttatctcctctattgacttattataaataaaactttttagtcgttgctgtaggagttacaacagcatttttataacagacccttttacaattattaatcctgaaccactttatatacaacttaagtttatagcagtataatttcagaggccacttaaaattaatcctgaatcactttatatacaacttaagtttatagcaatgtaatttcatttactcaccccttgtttttggtgctattgttgacaaatacacttacttccacatatgttataaatttgacaatacttatggactcaaaatgtttacctttttcaatgcttttcattccctcctatggatattaaattacatctggtttcatttcactgcagcctggagaactttatttaatatttctggtagtttatgtctcctggcaatagattttcttggctttaaaaaaactcaaaatgtctttatttaaccctcatttatgaaggatagcttttattgaatatgttgcttgacaagctttttttccaaactaagcacttttaaggtattattccattgtcttcaggaatccattgtttaaaacgaatatcagctgtttccctgtgcctaggtgtcctttttctctgactgcttttaagattttctccttcttttcagtttgtggcagtttaccatgatatgcctctgtttggttttcttcgtatttgtcctgtttcttacacctgtgcattaatatttttcaccaaatttgggaaatatttggttattagtttttcaaattttttgctacctttttctctctctcctctttttgggattataattacatatatattaggccactttatatgttagttccatatattaacatataacatatattatccccacaggtcactaagactttattctttttatctattcttccaactggataatttcaattgatctctcctcaaatttactgatattttcttctgctgttaagccacacagtgaattcccatctgttcactcacatcctcaaaaatatttagaatgcattccaaagttcctgtctgcaaatgtcaacatctgtaccgttgcaagttctatttctatcttctgcattttttctttctttttttgtatttcaacatgtgtatgtttcatgtgtaactgctgtactgagatataacttacgtaccacgcagttcgctcacttaataaaagcatcattcaatggtgcgtggtatactcagagctgcgaaactatcctcacagtcaatttaagaacattttcatcatccccatcctcatgcccggcagcactccctcatcccctcccaggccctggcagccgagaatccactctgtgtctctgtggatttgcctgctccatgcatcctctatcaatggagtcatcggtcttttgtgtgtggcttctttcgtgttatatcatcttttcaaggctaattcgcattgtagcatgtgtctgaacaccactcgtttttaaggtgaataatactccatggtgcaaacagacttcgtgtgcccatccgttcctctgctgatgagcatttgggttgctgggaccatctgggccatctgaaaccccctggagcctgtgctgctgattctgacatcagtggtcccgagcacacacttggcaatcctgaagtctctgatagaacagcggctggcatcacccgggcacctgccacgtgccaagcatgcagctaaatgtcactcacgtggccccgcctgacctcacacagatgggctgggccgctgatggccccgtttgtcagatgaggagactggaggcagctccaggtcacagagctgcgagataacaggcaggagcccccagcgagtccagagctcaccctcccaggccccacctcccatggcctgcatcttcaatttccaggtcccaagcagctcaggactaggctgcttctggcttctgggtcctcccgggaagtcacagcctggcactgagaccaccagtcccagcatctgttttcccagcagccccgtgctggtgttttctgcagctgcatttgtgttctgttggcaaaagaggaacctgctctgcatggtcccaagcaacggacgggaatgtttaacttgtgtattgatctggcagctctccagtgacttgggatttgccacaataattcactttccacctgggtttgtttgtttgtttttgagagagggtctcgctctgctgcctaggctagagtacagtggcacaatcacggctcactgcagcctccacctcctgggctcaaatgatcttcccacttcagcctcctgagtagctgggactacaggcgtgtgccgccacacccagctaattcatattttgttttttgtagagacagggcctcactatgctgcccaggctggtcttaaactccctcctggcctccagcaatcctcctgcctagggcttacaaagcactggacctacaggcgtgagccaccacaccagcctgtctgggcattttgacatcatgcagacgcagcacagaactgacctgagggatccaacagctcacccgccctgaggtttctgggtctgcagctgggcccaggcctgcagtgcacacagctgttcccagcacgtgcctgtcccttcgactcagtgcacacaagaaaccagatgagcccacgactgctgggaccgaggctgcctcgagtcccccacaaccgaaatgtcccctccagacagaggcctggaacaaacaaggctcaactaaaaatagacttaagcatgagagattcagaggaaggcagctatttttggtttggtgtgtttttgcaaggaaagatgagaaaaagaggctccctcgaggctggagagggaagtgtgtaagaggggcacaggggacttggggagaagccacagctccttttgtctgtcctgggctgactcgtctgcctgaaatgttgaaatcccgacccccaggactgctaggggagctctagttggaagcagagtccttgcagatgttatcggttaagatggggtgacactggattggggggacctcaaattcagtaactgtccttataagaagtgggagatacggagacacaggtagaagccacgtgagatggggtgacagtgatgcggccaccagccaacggcagcagatttctctggtcgtttctctggctagagaaataacacctccccgagctgcatgtggtgcagcgggacccacacggtgaccccggctgtgcgtctgggagggcggtgggtgctggacccctccccaccaggagatgaaacacgtgcaatgacagcaacccaggcaagtccccggggagactcagagccccgggcggggaagggtggggaagggctgtcccaggaggaggcacttgccaaagaggcagtcgccatgctgttggctgcaggtcggggggagactgagacccacccaggtcagcaggggctgggagcgcgggtcagcagaacgccccagggaaaccgggtgggtgcagcatctgggaggggatttgccctgcgaggctcctcgtggggccctttaagccaccaggtctcccagtgggatcagagcaggatcccatggcctgaggtggggctgcgtctggctccagcccccacccctcatctgtgcccacgtgcaccccagcccagaccacgcccagctgatcacaggccgggcgagcttgaaggtgcttggagaggtcagagtccagccaggctgggtctcagagcgacccccgtctctagcctcagacaaggtgcccctctccagccctcagacactggcctggcctgatgagagggacatggctggcagaggtttcttcccaggtttgatcagagccagagcaggggaaagtttccctgttgggggtgtcgatactttgggaaaatgggttcctggtcccaaggttgacgtccccctggcagagtgggccgcaccgaggtcaggacacgaagggtcttctcctgggtctgctggagtcgggggcaacctgcagccttaggggtggggggtgcgggtgtcatggacgtcagccccacctcctctcctgcagccacctgaggcccacccacctcctcatccctgtgcccaaacccgcaccctggtgcccagcacttgggggcgcccacagatgtgtccgtgaccaccttgggaagtggctatgcgtgtgccgcagccccaccggggtggctgggaggtgccctcggaatgattcatgcagtgacttccctgtggcctggcccatggcaagtgctctggggacgtgatggtggtgcagggaacatcgccccgggcctgcagctcccgcccacgagctgtgcccaaacctcccctcaggcctgcagctcccgcccacgagctgtgcccaaacttccgctaaggccttgggcccagctggatgcagggagcagggggtgcgctgggcagagaggggtctccaggcagggaccttaaaaaaggatcccttccgtgctgccggtcaggcccctccaagtactctctggaaaaggatttcaaagtccagccccgtgccgtccacccaggcttccctgagagccacgccccagggccctgtttcttgagaaaatcccagcatgaaaaacagttgggaggaaaacagtttgctgggtctccaaggcccctcggagagcaccctcccgaggaggcctctgagccacctggtgccaccggaacagctgcagccgcctggagagccagagggagccgggtggggcccgggggtggcgctggcatcgcggaacacccccgcccgcgttccaaacgaaagcacatcacccccaagcgacgcgacctaggggcgagttttaaaaggagcacttacttatttttagagtgtgcttttcactcaggatcacacgacggagctaaattgcaataaaaatagtgcaatcccgccagcaagaagcccattcggcaacgtgtccttttgttcaaaataaagtgcaaaatgatttctcgcaataacaccagcaaccggcttcaaaggccagctgggttggctcaggataaatgactaagcgtacgccgagccctgcggaggaagctcagccggccggggctttgctccagagcttccttttccaaaacagatgcttgggaccaagatggagccagggaagccgggttgggtgacggcgtccgggttcctaggctggcaggctcggaggccagagggcaggcgtcccttcgggtactgactcctggggcaggcaacagattcctcctgggaggcccaggcggaggcagcacagcatctctctgttttcctgcaggccgacggggatcctcagtgtggtccgctaggaagatgagtgagccccagagctgagtgtgtttgggctgtggattgtgatgcagctggaaaaacacaaccaggaccacccagcaggaagcacaggaagactaaggcacagagagggtcaagaactggccaaggtcacacagcaggtgtgtggggagctgggatttgaacccagctccagagtgtgtgccttgacccctcactgccgtccacaaggggaccaatgagggtcccttcccccagcaagtgccagacgagtcctactttactgctccttgcggtgctcccccctcggcacacctgagccgcctggagccactcgggcaaacctcaggcgttccactccgataagggtgtcagggaagagcgagggactgtgcttcagggggagagctcaggctgagagaggagagccaggcccgggggtagggtggcgaggggccacccaagggggccacaccacctccctgcttgccactgcgggctggacccgctctgcccgcctatctcctccaccgcctgggagaagacccatcctgggggcccagagggtggggcagggtggaagtggcctcggtcctctgctcccgagagtcctgcctgtgcccagtgtggctgaagtgacccagagcccgggaggacgtggaggacaaggctggcccagtgcctctcgagtcctgggctttggcttctccagaagcagcccctccacagaggaggcctctgacgtgtccaaggcctcagctatgtcccaggaaagcgggtttctgggtgagctattcctcctctggggagaatggaagccagcctgccctatggggctgaggtggctgagccagacccacaccctgagctgtcccgtctgggacgtgagcaggactcttggagaaacaacccttgcagatgctctgtggatgacagtgaggggtcatggcacacactctggagccaggtggccagactcaaaccccagctccctacacatgtgctgtgtgaccctggacctgttctttagcctttctgtgccttagtcaccgcacctgcaaaacgaggctgcagcagcttactcagagaggaataaaggctgaggacctgggtctttacctgctggctctcctggccccccccggggctctgagacacaaagtcgcacaggggtgggtcccactggaggaggggtcagtgtagaggtcccattttgctaatggataaaactttttctcattttgattaataatgactaaaaactgtgtttattattcctttgttttctgtcctgctgggacttcagtcaaaaaatgattctcatagactctgagtcaaggtgccggagggacagggtctttctaaacggcatttcgcaaggcccgccggaggaggtgcagtgccaagatgcaaaacagaaccagcaataattcaactctgaatattttgcctttaattacaataaactaataaagatttcagatgctctcattttaatagaatgaggagttataattggtgacctattttaggcaatttaatttccaatgacctgttttccaaattaacatagtaatcaaggccagggtgccgttcagggagtcagaccctccaagggtcccacacctgcaccgcgtacaggcgcatctcttactaacgtgctcatagaaggaggtgctaaattatggaaaggttcctttctacagcatctaatgagcctggatttttaaatcaaagcataatcaaagaaaatgagcaaggacatcttgagcatctgtaaaatcactgttgaagccacaaccctcaatgacttcgaagctcttctcaggactggagtgtatgtcctccccgaggtagagatcgctctcagaggctccttcaaaaacccccaggcaggagggagggtgagtcgcacacctcggcctcaggtgccctcccgctgcctcccagggaccaccgtgcagggccaccaagaacaggcaggggggagggggagcaaggtggggaaggtggggcagaagagagaagcaggaaggagggagaggaaagagaagagggagatggactggcctcagccaccccggagtacagggatgtcatcacaccagccctccagcggctgaaagagccagtgagaggcaggtgggggtgtggatcaggcctgatctcccctagtctcctcctgcaatgcccagattcttgcccccgtccttccttctccctcctcccttcctcctccctcctcttccctccctcctgcttcctccctctgccctccctcctccctcttcctccctcctcctccttcctgcttcctccctctgccctccctcctccctcttcctccctcctcctcccctctcctctttcctcctccctctcccttcctcctcctcccccctttcccaccctcctccccctttccctccctcctcccgactccctctccccttctccctcttctcatcccttcctcctcctccctcctcccttcctcctcctccctccttcctccctcctccctcctccccacactgtccatttgcaggctgcctggtcctagcccatatccaagggcctgtctcagctacaaagttctgctctctgcttttaaatgaggacacaaggtggtttccaaaacacatgtacaaggcagaaattgctcttgaaacagcagacaagcaagacacagccctccctcctgttcacattagaggctgcaggcaaccccagttgtctcagaaatgggaacaagccccctgctcagcagagctggtttcccatggatagagctgttggctttctggaaacctttttctccccaccctagaccccaaacatccttggggttgtgtaagaaggaaggggatgtcccaggctggaggctggcagggcagctggaatacgggagtgggaggggagggaggaggcgagcagggagcagggccagttctcctacatgccttcttccggcctcttcttccccactcggggttctcacaggtcccgcccttggtgccagtgatgtctcttctgcacctgctaaagggcagaggggccccttggaggcagctccatccaggcctggctgagatgtccaagaggcagcagggtacaggggtgcaggttaaccctgccccagagtctctgtccaggagcagcaggagcaggctcaggacggcttcagctccatggctgccctgggtggaagtcaggctggatacagaggccaggtctacggaccctgcaggcctcagaggaggaagttctgttttgggagcccactggttcctggggcccatgagccccacctacttcccaccagcagcatcttccccttgccccactgcagcccctggacacagtacagcacagggcggagtgagggctgggagggcctttgtggagtcccactggcttcaggtgaagatagtggccctggctgaccccaagcctgatccccagtgggcctgctcctctcttctcaccccgccacttctctgggccttttccaagccaaactctgctccctcattcaataaaatctctcccgcaagccagccccctgggcctccacccgcccatggcctccgcagtggccaggagcctgcgggagaaggtggcatctcttcccttccgtaaaatctccccgccctatttacaggagaaacaatgctctgtggctcccagccagccctgtctcccctgaccttgagcacctttgtctaaagggatgccctccttaattctgtgctgagctggattaatttttaaagatgaagctcctggctcgtgtgtgctgctatttgtggtggcgaggtcaggcagagtgccggcccggggagcaggaggtattagcgggcactaattccctggggacagcaggccgggattatcgctgtgtgcccagcccttgccagccctgctggctgccagctgctggcaggggcctcactgtgccaggctggtggcagcccacagtgcactggccacatggagcgcactgggtcacggagctctggattcaggtgggattatgccccccaccgccaaagccatccttcctggcagcaaaggcctgtgggctgtggctgcacctctttcctgggtccagtttccccccagggattcaaagttcctggcccttttgtggctagggtgaccacagatgactcacttggggcgctagctggggaggctaaggagtcctccatcagccccccagcgcttcctgcagagcccattgggcgtcctatgacggagggccctgcaatgatgccaggtttcaaggtgtgcaaggggaggctcctgccttgggcaggtttgtctgtctagagaaataacacctccctgtgccaacaacagggaaactgacggggtgagatgcacgttacagcagcgagggaaactgacggggtgagatgcacgttacagcagcgagggaaactgacggggtgagatgcacgttacagcagcgagggaaactgacggggtgagatgcacgttacagcagcgagggaaactgacggggtgagatgcacgttacagcagcgagggaaactgacggggtgagatgcacgttacagcagcgagggaaactgacggggtgagatgcacgttacagcagcgagggaaactgacggggtgagatgcacgttacagcagcgagggaaactgacggggtgagatgcacgttacagcagcgagggaaactgacggggtgagatgcacgttacagcagcgagggaaactgacggggtgagatgcacgttacagcagggagggaaactgacggggtgagatgcacgttacagcagggagggaaactgacggggtgagatgcacgttacagcagcgagggctggaagagtgcagcgcaggcgcctggtccctgggcttctccaaaacagtgtagtgtcagcctctcccaggagctcctcagaaacagaatcctaggcctcacctcagaccctcttcatccaagtccacattttcacaagacctccaggcaactcaaacacacatttatgtttgagaagtgctgctgccctgttaggctcctgggggaggtcagtcctagaggtgggggccttgcagatgggcagagccacgtgggaagcagtgtgtggtccctgagccagagggtcatcagggcctgaagctcccccaagcacaagagggcgccggtgcagccatcgccccatcacactcctcctttagaaagcaaaagaggccgggcgcggtggctcacacctgtaatccgagcactttgggaggccgaggcaggcagatcacgaggtcaggagttcgagaccagcctggccaatatggtgaaaccccgtttctactaaaaatacaaaaatttgccaggcgtggtggcacatgcttgtaatcccagctactctggaggctgaggtaggagaatcgtttgaacccaggaggcggcgcttgcagtaagccgagatcatgccattgcactccagcctgggtgacagggtgagactccgtctcaaaaaaaaaaagcaaaagagctcccaggaaggtgctcacgctcctgaacgagggtgggaaggtgcccacgctcctgaacgagggtgggaaggtgcccacgctcctgagtgagggtgggaaggtgcccacactcctgagtgagcgtgcacatgcttacaactgcgtttcccctgctcaagatcctcacagcacttagaggacaggagggttgtcagcgctgagtcctgatcacacaggcttagtgttcagcaggtggttggggaacacgtggatggataggtgaatgactgggtgggtgggtggaaggatgaatgaatagaaggacggatgggtaggaggataattcaggggatggatggatggatggatggatggatggatggatggatggtggatagggggtgggtgggttgtggatggggatggatggggatgggtgactggatggtgaatggtggatggatggtgggtggggtgtggatggatggtggctgggtggatgagtaggtgggtgaatggtggatgggggatgggtgaatagatggtgggtgggttgtggatggtggatgggtggtggatggtggatggattgtgggtgggttgtggttggtggatggatggtggatggatggtgggtgggctgtggatggtggatggatggtagctaggtgggtggatagatggtggattggtggtggattgatggtggatgagtggatggtggatggaggattaggtgggtgaatggatgactttagtctccagagagtaagaaaagcaagacgaactctagtacgccactggtgggaatgtgaaatgtcataggtactttgggaaatagtctggcagttcctcaaaacctctggggtaggctgtgaggtccctcccagggctcagccgtggggccccatgtactcaggtggtgctcacccagccctggggggcattcttttggggtaaacacagttacctcgtgacccagcaattctgctcctaggcatgtagcaaggaaaaatgaaaacacgcagccatacaaaagcacgtgcacccacgttcacagcagccatacaaaagcacgtgcacccacgttcacagcagccatacaaaagcacgtgcacccacgttcacagcagccatacaaaaacacgtgcacccacgttcacagcagtttcattcatgacgagccgaaacgtggagacaacccagatgtctatcctgatgaacagatcaggaaaacggggcacacccagacaaagggatgtgatagggtcacaaaaggactgatgtgcagattcatgctacaacgtcagggagcctcgcaaacgtcgtgctcagtgaataaacagacacacacgacagcatgtatcgtgtggttctgtgtgtatgacacatccagaataggcaaatccttccaaagagacagaaggtagaggcgcggtcgctgggacagatgtggggacgggcaaggtaaagcagcacagaccttcctttgggggataaaaatgttctaaagcggatcaggggtgatggctgcacgggcctgtgactatgctggccgggggccggggcgggtggctcacgcctgtaatcccagcactgtgggaggccgaggcaggcggatcacgaggtcaggagttcgagaccagcctggccaacacggtgaaaccctgtctctattaaaaatacaaaaattagctggatgtggtggcgcacgcctgtaatcccagctactggggaggctgaggcagaagatttgcttgaacctgggaggcggaggttgcagtgagccgagattacactactgcactccagcctggcgacagaacgaaactctgtctcaaaaaaaaaaaaacattaaaaaaaagtgaccgtgctaagaattattgaattgtgcggtttgaaagagtgaagtggggcatgtgggttgtatctcagtaaagctattagttacccaagaaaagcacagaaagcgagatggtcaggcccatcaccctgcttcctcccaggggcctgtgggtgaggctcaactcaggagctggggaacaaggacaaggccctgggccgggcgtctgtggggccaccttgcaccatgctgccagccccagcctgctccgctcctcacctctgggcctggccctgcacagactgggtcaccctcttttcacaaggcaggacagcactgtgcttcctgttcagcccaggctgtccatttcccaccagagggaggggagcagtgagcccccccccaggggctcatcagattgggggatcccatgtgcccagggaggcaatctctgagccccgcagccctggcctgtggaagcagcctgatggccatgcatttcagaaacacccactaggagctgggccacacctctcgttaaaagctggacagccaaggccccagggctggccctgggcaagtctcctgtcagctatgggatccactggtagggtctacaggctgatggagccaggagcgggcaaacatcccactttggtcccagagggcactgtgcagcttctgccgtcacaggggacattcccaagtgaccagaggggacatccaccctgagcagctccactgttgggggcctcaggctatgtggctgggctgagctgccagctcccaaacaggacgttggcctcttctgacatccaagctctggcaggggcatgtgtcctgctggatgggactggacaatcctcacgggctaggggaagtatagcccagggcagccaggggaggctcctctccatggagggaggaccccaaggccagggtgctttcctgagcactcaggactgccatgggaaaagcaggcccctgtcagccgtgtgcacagcccctcccacacctgcctgggaaaagtgaggccttagagcccgggaggcaaatctgctccaaccctggaggtgcagagaccaaagccaggggaggcttgctgaggacacctgccgaggggccttgggatctgggccagaactgcagcatggctgggagcccctgggcccatctggaggaggctgagtggtaacaggcgccctagcttcacactagccacccactgccccccactcagtcacctcctctgctgcccatactgagacccggtggctcaaccaagactttggaaggacaaaccggtggtcatgggtcacgtgcccaccgttcaaggccccaagaagccccctccattgctgctctgtcccggaggttcctgcaaggaacacaccttttgcttccatggtgacatttgcggtgctgttttaggcttttccgcctctttccttcacagggtcctggggcaccacaccagggaggcctggccgggcacacacagaggacagtgggaagtaagcaccagggcccggcctcctgcctgaggggtcagccagccgctgaccacgtcctgtagctcctaacgtaagctttgcacccaagaacaaggggcccttccagcccctgactccccagttaacccccaaacactacagagtgttggccacagtcacacacatccagccccaggagggcctctgcctcctcccttgacctccaagtccccttcctgccattccctgccctgggtgcccccactcccgcctttgactcaccccatggccatttgcagacgtggagcccctggcaaggttcacctgcgccaggatcccaccacctcctccgcctccagtggccatgcaggcccgctgaccacatccctactgggcacatgttggaccccaaatttcctgtccaccagaccctcagactatgagcttatctggaataagggtctttgcagacataacgaagggaaagatactgaaatgaggccaccatgcatgagggtgggtcccaaatccagtgagacagagaagcagagatggacacaaattcggagaagaacaccacgtgaagaggggagccgaggctggagcgaggcagccacaagccaagggacgcttggggccattgaaagtttgaagaggcaggaaggacatcccccaccaacagagctcctggaggaagcaggccctgtccacaccttgatttcagatccttgatctccagaacatgagggaagaattttctgttgttttctggctccctccacagctcttagcgctgtggggctgcagactggtctcctggctaaccagagagcccgtgctgatagagccactgctcagccctgcctgcacccagcatccagcgtggggcctggaccgtcattgtgtcctggtagatattggtcaaatatggaatgaaagagccttggagtcagacacagggctgaacgagtccttttcaggccatggtctaagctccacacggcacctggagcaccgccgtggcacccgctggggtccacaaacacctcccggcctgaaaaggggaatcccagcctttccatgatctctggagatttgggacacttgtgaatcatgcatcggctttacaggacgctctggggcttagggagttgacaggtcaacagtcggatagaccgtccagggaagctcccaggaagtggagcaagctcgggcgggcagatgccgggtgtctcctgggacctgctgcaaatgccctccccacctgcccaaccccaccccctaccccagacagagagcatagcccctgcctgccaggaagggtgagcgcccagcacaaacagattcagggcctcccgctgccccagaggacctctacattcatcaacccttgacgtggttttcaattagcgtggaggaaccagggtttatcgctcttctccgtcactccatttatatttaatgcatttattgcccacattctatatcaggaacaactgcctagaggctgcccatccccagggagcagggttttattttcctttcctcgcaatcgatcagagattaagttgctgtgtagctttttattggagacacacatttgctgtgtttaacaggaaaccagagaaggaagctcagcgtgggccataaatgattttgcttccattgatcaaagaaaagactgcccacatcagtcatcatcacccaatgcactctctgagggcaccctatatatgctcaggcacacacatgcacacgggcacacactatccaagaggagagagagccttgagatggactcaatggctcctggacactaccctcggctcccccacagcctcctagtggcttcaccaggggtggacatccagactttgtcacagctgaaagccccacctggcctgtgagggagcatctgcagccccggacagctgccctgaagttggccctgtgcagaatggtagaccctttggacccacattggtccatggaatggcagaagcctgttgtccttccgctggctggggcctgagcatcaaagtcatctttgcttcagaatcaaggaacctgggagggctgaaagccaaccctccatcccaccatgctgatggcggccacggctccccagtgactcaggtttggggatcctggttggtgataatgaagtgagcagcacaggatgccctgccagggccaggggtctatgcccccatgtcccctacccctgagcaggtgagctggtaccgagacaggcagcaggtgcactcccaagtctttgagacgctgctggcaggaagtgttcccttccggatctgtcctctcacgcacatgagtgcgcacacacacacacaggcacttgccatggcacagagacatgttccaccagaagcctgtggactactcgcttgggctttaggggaggaaaagggaaaagggaggaattgctaggcaaccagccaggggttgctatggcattttcaagagagcggctgggccaatcaaggctgactgcaggcaggcggaggcgggagccaccatgtcacagcagctcagacagaggggagcacactgctgcacaggcctggggagggctggcgcctcatgaatatgcatcaggctgattgaggcaaagtcaattaacgacttgacggcttgatttcccctggattctactcttctcctttaaccatttggctgacacagggcaggctccccgctttcctgctggccccggagttttctaacaggtccaatttgctttcctaatcctgacctggcccaggggtcctggcattgcttggtgctgtttctactgaaatcttctgccacctatgcaggcagccaggtcgctggtcccacagtgggtcccttggtgccctggcaaggcctgaattcctacctgggaccaggcacagtgcagcagctcctgcaggagatggtccagttaccccccttggacagttaccaactagcgaccacaggcctggccgacacacatctgggcaatgacctcacaacccctgggagcatctaggcacaaccagttttgtgggtggcggttggagaaagctgggggccagcccagggcaggatctccttcctgggctctgcagcagtttctcatctactgcagtggggttctggccagagcagtcagaaagcatgaaggaggcactgctcgcttcctccacgtgactcctggggtgcaagctggggcagggaccccggctctgccagaacccccagggggctagcagggtctttgctggattatatttctccttcatttcattgttctccccagtgaattctggggattctgagaattccattttgccctgaatcatacgcagctcttttgacagcttcagaagtggacgtcctgttgtgtgcagcggggagaatgtcaaccctatgattaacgccccacatggtggtgggaagaggctgggatgcctcaagtcccaggcccagaggatggtgggcctcacaaaacttgggtgcagggtgttgcagaggtccgtgcaagaagggaccccgaagctggaagctaaccgccactggcttctcaggaagtccccttgaccagaacccagtcccagacatatgaatcagtagccaaagagggccacaaactctgggtgctggccccgtgcctggctctgggggcagagacacacgggcccttagggctgagaactcaggtggaggggtctggggtgggagggttagtggcaaggaatgcacgggaagaacacagtcagcggccatggacctggatcctgttcacgcacctcaggcccacacggtgggcaggacgggttagagccgccacctgggtccaatcggccgggtgggggcagcccaggaaggtgttcccaggagcagaccccaggttccctgttgcagcccatcccgtggcccgcaggctgcctaatctccctgctgcagctcccatttgcttggcctgcagaaggttttcaaccacagccgagcaaggtccttaggcaccttcaaggctgagacattcgcccctgatccactgactgtgggctctcgggagagcggccacacccctctcaccatcaacagtcacctgggcctggccctcatgggagacagactcggccagcacctcccactgccccctagttgggaggaaccccactctcacctggggctcccgtctgcaagctccaggtggtaggaccgacctgggtcactctcgaaccccacactcagcttgtggcccccacacatgctcacccacccatcgccgcaaccgtttaaagagcaagggcccacaccgcacactcagagcagaggcggccttccgaagagagggcgggcacacatggaagccactctcttcagcactgaactgaaagacccgggctgccctgagcttgggatgcgggaggcacctggacaagcagggagggcagagccactcacagagctcagggccaagctcatggccagggacaacttctctgggtcctgctgccccgaatcctccattaggcctacaatggacaagggaggcatcacccttgaacccagcttttgagagagccccactcaaggaaggatgagagcgagcacctcctgtccctccccggccccaaagccctcgagctgccccttctgcccaacacctgtggtgcccctgcactcagtaggtgcttcatgtatgctccatggacagggaagtgaacacctgggcatccgcacaaggaggtggcacgcacttatattgggatgagggacgtgtacttccaccagaggccggggctgcccatcggccagcatttcccaaagtgtatcctgggtcgcacctcgaagttgctctgaagaaagaccagggcctcctcctggaagccggtggctcctgggtcttcactgctattgttccctccacatgggagggtgggggctgccaccatgtcatgcacagggtgcaccctcagacagcatgcaccccagggcacacggcaaacggcagagctggcctccaccagggctgtgcggggctgcactagatccagctttccggggctccagggggttcctcaccagctcctctgaacacgctacaggcccagttgactgtcactttcactgttagggagcatgaggcgttagaatcaatcctgtgacaccactgtgttgtcaggaacgggccgtgccaaggggcaccactaggtcaggcctcaaggtctcagctccaggatgcctcacccagagcaagacccaggctgtctgcaggacaaagacgtcggaaggaagaagagggagaagccaggaaggtggaggtctctgagaagatgtggtgacaccagggcccaagggctccccagcttatggtggagggcactgcctgtcttggtgtccatgaaactttggatgaggaacagcaggaggacaggacccaggcaggagcttccagctcagggaacgacacgccaggtggaaagaacggagccccggacgccgaggacgggaacaggatcacgggcacctggatgcaccaggagggcgagagaatcaggaggggaaaggaggaagaaggccttcagttcaggaggagaagggccttgcaatgcagagacctcgcagacgcgccgtcggcctgtggccaaggtcaacacaaatgtgcacggcctgggctgtggcatggaggccttcatctctctgctcttctcccagagacaaattcgctacaggacatccaacagggcacccggccactcccctggaggcccaggtcaccatgcacagggccggtgagaccacggggacagcctcccggtctttcctgcaggggaagactgggaatcggctgctcctgcagccccagtctcatcatctgtgaaacaaagacaaggaaacccgttttatagccacagctcagtctttgactaagtcacatcctcattgctcctgtttccacagagcagacaccgacgtccagacatccagactggctgccaccagctcactggaatggccagcccgtcccgccgaggccagtggacatgccaaatccctcccgcaacaagttgctatccatcccctcgactaatacttaccaaattaattccagatttggagtcactcatggttcccaccagcactcagccccatctcagcccccatctcagcccccaccgcagcctcacctcagtgcccacctcagccccctcctcagcccccacctcagcccccacctccgcccccacctcagcccctcctcagcccccacctccgcccccacctcagaccctcctcagcccctcctcatcccctcctcagcagctgctggaatgggctaccctcaggagttggcaccccacaggctccttcccttcccacctccgccacaccctgacgagggaaaaatggggagctgctgggagggaacttgcaccctgttgggcgccttgtatccccagcctcctctcacaccacaggctgctggggccccgtcagcggagcacggctgcagcgaatgttgaaaccaccagttcccattcctagcagggctgaaagaaggaggacacctggaacctgctttcttgctgctgcccttgggggtggcccactctggcagctgcagcctcgaacctggctcactgaggggtgtgtgggggaactggggggtccctggggtcggtcctaggaggaaaaggtggcagttgtccatgctttctggggacgcccagggaaactccgccctgtggagaccggagcttggctcagcccctccctcctgccctacctctgtcctttccagccagtggcaacaaagcccaggtgtgaggcgcccctggcaggcgtctgggcctggctctgaggggccagcgggcatgggaggggctggcagggcggcccttgtgttctctgctttggaaggagatagaacagtggtgccagcccacccgcagatacggcggcacgcagaggcctcatctgccccttctgaggcaaagcctctggaggagccccacaccgggccccccaggcagcagcacctcctggtcctatcatgtgagacacacagcccgagaggacgcctgaggtccggcggggacagcaggaagcattcagggaaggcgctccccaagatggaccatggtgaggctcccgccccgggtcctcaggtgcagctggctcagggaaggcgctccccaagatggaccatggcgaggctcccgccccaggtcctcaggtgcagctggcaccctcatttcctgggatgtgagacccacgccctggatgacgtccctctgtcctcttcacggtggctcctgccctgtgagaccccagaatcttccagagagactccacagcctgcagcgagcctgtttgctgagctcctggggcaggacagccagaccccgaccaccctgatggtaccactgcagctttgcgaatggcatgtcccctccaaaacctgctgcccagaggggaggagaagggatgcaaggcaggttccaggtgcttctgttttgaattaaaccaaattatgaacaaaacagccccataggaagggccttgggatggcaccagccaccacccaggcctcggcaggccccagccagggacccggggaccccacgtgccagccctggggcagtagcatggcacagacacagcagtgagcgcctccgtggctgccccacccagcctggagcttggcgccctgcaggcatggttccaggtccctcttcagagctgggaatgataagcagactgctgggaccccatcctcacccacacctgcgtggcgggactgctggctgccttgatctacccctacaggggctgatatcctgtggcaccccaagccccccgatgaccctcagccagccagcacacaggagagtccccaaggctcggtgtaggggccctgcaggcagtggtgagatgcagggtctgcgtttcccaggccgggcagtgcaaagccaggagcaaaggcacccctcaccatgtggcacctcctgcccctgctggcagagcccacagatcccaggcacaggatggggagggcagtgtggctccctcccaggcctcagggagtacagggacatctgggcagagggtgggcaggatttcaggcatcctaccccctgctaagggaggcccccggaaatcaggaattggggcctagggagctgagcaagcctggtccattctctagaagtttctcctcctgcagggctggaaagataggttgctcttctggtctgttctctgtaaatgctcccccaacatccctgggtggggtttcctcttcccaaagcctgcagggcctgaagggtgagcccctcacttggtctctgcagcctccatcgtcaaccctcagggctcctgtcctcctctccctgcaccctccctcagcattaggtgggggttcctgtaaagctctggggtcagggtctggccctcaagatccctgtgaatttggcgactgcatcactcttaccactgccaccttccctgttctgctcagggccaggttgctccactctgccctagtctcctggggcagctctgagcttctgcacagtcaccttcggaatgcaggcacctcccagtccccggatctcccagcactgtttcacccctcgttgggtggagctcaggaagggcctaagctctccccatccctgcctctcgccccacccctgcctggcatcctcaacagcctcactggtcccccaccagaaggctcttcccttccatcaacctgcacagagactgttgctggcgggggaaccagggtgaaggtgcctctctgggctcccagagtttcttgccctggtctgaggggcaggaagtcctgccattgatgccttccctcccagtaaagacaactggcaaagaaacagatggtgcccttgagctgaggattgcaggagggtttaacaagtgacacgggcagttgtggggaaacccagggacagaacggcatcctggggctggagaggttgaggctgccacccctccagaccagagggatgtggtgagtagtcctgcaaggggcttgggggctgacactccctcccctcctttccctcacatcctcccctccctcagccaaagccagaggctcagagcccatggtgcagcacaggtggccaccagagccaaggggaggaggggatctctgtgcactggctgggatgcagcacatcttcacagtcagtcattcacacattagtgagaatttgtgtctaagccacttccaagggaagatatagggagaaagaaggcttggaaagacagtgggaaacagagctgcacaaagtggtcctggggatggccaagggatgagaccatggtgcacctccaagggcccagttcatcctttgcctctgctcctccccagcagacacattcagctgcctctcctgagaatgcaggcccacactcccttgtccagcctgagaagcccccagtgacaaggagagtgccccagatagccccagggtcagcccaccccaatctgatgccaactccaggcacaactcccatcaggcgagcgtgggaggaaaatagcagattttcaaaagtcacaaattagagcatgaaatccaatgcttgacataagccttctgtgcagaaaccgtgaggccctccagaagcatggaagcccctgtggcgactgagcccctttcctgacagaagatctcccttctatccactctttcgtttaagtaactgtgttttaaagacagctttctatttccgctattagtggaaaatcactatcacttgccctaaataaacaataccctaaatgaacacaactgcacttaaacaggctcacctgcccctacccacgtcgcacagccactgaaggctctgagcccagcgcctgccctcattgtcaaaacaaggacattctggagtgtctgagactcgaagacaaaccagcactaacaggtcctttctctgcaccctacaggtgcgccatccttagcccccaccccaggataccgccctgttaggtccaccctgcctgctttcccagagctgccccaggcagagggccagccccaggcaggcagctgggcacaaggagcaggctgtgtgtccttccctgcagcaagacccaggacagcacagagacccatgcctctctgcgacccggggaaatcccagggctctcatgccccctccctggagggtctgcactggtcagacaggaggggtgcattctgcctggtgggctgctgttctgctcagccccaggaatccctcccatttcttaagcccatccttccttgggcttgtcctctcctcccctgcccctagatgcctggccccagttacacagggaggtaggcggccctagggcaatggcctggggtggacgctccagtttcttcccagcatggcacactcctgtggcatttgacttagcggtggagggggcatcccccaagagtgaggtaagagaatacccatgtccctaaaagcagacagcagcctgagaagtccctttgatggccctcctttcttgctggagtcattcctgagaggtaaatggaaagagatggagatgagcaagaggaagttgaggaggaagatggtgcagcgatgagagagaaccaagaaaaggcgagatggcaacacatagacctatgggagagacattcagagatgaggagaatcatagaggccagaaggagagatgcagagacaggggagacacagagaccggggagagacagagacagagaccagggaagagacagcgaccaggggagagacagagaccagggaagagacagtgaccaggggagagacagagaccaggggagagacagagaccggggagagacacagagaccaagggagagacacagagaccaaagagagagacagagaccaggggaaagacacagagacagggggagacagagaccaggggagagacacagagaccaggaaagagacagagacggggggagacacagagactgggaggacagagaccagggagagagacacagagacacaggagagacacagagacatgggagagactcagagacaggagagagaaagagacgaggggagagacacagaaaccaggggagacacagagacaggggagagacagagaccggggagagacagagaccaggggagagacagtgaccaggggagagacacagagaccaggggagagacacagaaaccaggggggggcacagagactgggggggacacagagaccagggggagagacacagagacacgggagagacacagagactggcaaaaacacagagaccaggggagagactcagagacaggaaagagacagagaccaggggagagacacagagacccaggggcaggtgctgagagagtgatggggacctgaaccctgagaaaggactggcagatgtgtcctggagggagggacagaacaagggccgttccagccctaccccgggaccatgagctgcaggccatccagcagctgtcagcccagccaaggatggccttgttctctgcaccccgagccaagccacttctgagggagctccacctttggaggattggtgcctgggccagctgggccccacaagcgcctctgtggtggagctccctctggtggggtcctgagtgctggggccgctgagaacatagggggaggggcattgagccaagtcccgcccttgtgaccaggagggggctccatgggggacacctgagggcctgaggaaggagagggcgccctgtcagatgccgcctgctcccacttagaggtcaggctgtaactgaggaggccacacagagtccccaccccatgtggactcagggacaaagagccctcaccctgtggccacgctggccgcatccaactttgctgggtcccatggagggggacccagggctgggagagaccctgccccagctctgcgtaggtctgttctgggtggtcctgaggcccaggttcaaaaggaaagtgccctaaatgggtgtcctgctgcatgcctggggtggccccaaagccaagcaggaggggttcccgctggaggagtcgaggccacaaggccccagagccttctcgaagctcctgctctcaaactcctccatctttctagagaagagagcagtgctggggcaagctgctcacccctcactcctccagggtaatttgctgacaccaagatccctaggtggggccagcaggggccagcctccctaccctccccgcaacacaccctctaggaccctaggctaggcttggaggcaatgggaaggaggcagctgcccaaagccaagaggcgccctgtagagggggccagccctgggcaaggggcgggggccgggggctgctggcccaggctccatatccccaattccccagcaacagtgcatggccagggaggctgggactggccaggttcgcacctcaggctgaaatattggcccctggggaacaaaaggcctattcccgccatgggccaggcacccagctcccctcgctccacactggctcccgcctccctgcccgcccaggcgcagtgcttacctggcctctattctgcccagctctcagcccagtagctctggcgggacccacaaggagttccgcctctgggacggtcagtccaaggtctatgtattccttctcactggggccagggaggagggggccaggccgggagcagagagaaaggggccgtggcctcatttccatgcggaggccccaggccctgtgctatccccaccctattgtgcgcctgggcgggctgacaatcgaggtctttgtggtcggttgctgcactcccaccctcagcgctcaggcaggcggggtccctgccacccgctacaaagggtgaggaggagcaagaccaggagaggccctccctctccccaccaggcacggggccccacgactggcctcgtccagacccaagcccaggggacaggtgtggagggagcacctgcagatggagtctccctgctccctgcaccttgcctctgagtttgtgcgtggggccagttgccatgtttgcactcccaccccctagtcctggggatcaagctgcctggcagtgtccctggagctcctgggggtggaagagggcccctgctaggtgggatgggccttcgggggcccctgctcctcatggcaccaagcatctgcccacctctggaggttaagcctggcgtgggaggaatgggaggcccccttacccacaggggagatgtttggggtcacagtcacagatgctgggtgggagggggacccaggccttgctgcagagccagacagaagtctccgccatccctgggtgaggcactgggtgggggcctctgagctcctttgaccaccccagctggaactgggaagctgtgggccactgggaggcaagggtccccaccccctctgccacccacatctgtactgtgggcacctccatctggccttccacatcctccccacctccgcatgctgcaggggctgggtggggggtggtctgcagcagactccaaaggaggcgagggtcaagggtcaagaggtggtgagccagctgttcccagatgtgggccgcggcctttcctctttctggaggaatgacaggcctcccgcagaggaggagcgggtggtgacgagggagaaggagcggaaagggaggggttctccacgggttctgttgatttgtttaatcccacgctattcggaggctttcacggatggcggacaagagggagggggagggggtgggggtctcggcccgtgtttcctcccctcctcccgctcccgcccccgccggagccacctgacccgtagcgaagttgccggccccgctgcgcgccggcctttgtgcgcaccgaggcggccgccgggaaccgggagcccgagctggcccggcagcgccgccgcccccaccttcgcgccccttttcactcccccactgtccccggagctggcaaataaacaaatccacaaacaaattatccgtgtgctccggagaggcggcggcgtgggcggcggcggagagaaggcgccgggcaaggcgagactaggcccccgcggagcgggggaagcacagaccccagcccgggcccggcagcagtaagttgacttttatgaaacctacgaagctcgcggggccaccgaaaaggtccccaccggagcggactctgcggggcgggcggggcagaggctgcaggcgggctccccttcccgcgcggctcctaccggccggctccgcccccaagccctggacggcccttcccccagcccgcctggctgggggccgctgcacaccgggggtggaagtggggagccggggaccccgatcgctactcaggactccaagaggggccgggttcttctagggatgtacaaaaatctagggtgacccaagggaagggggcgacccccagccttccaccttacccaccccggcctgccagagagccctccgccaaaggtaaagtgggaaggacgaaggtgctccgccaggtgagggaacaggtctgccaggggcggcgatccaccctgccccaggtggagccggtcctgtacggaaaagagacccaaagaaagatttggggtccccgaagccaaggtaccgatggggggtgctaaggagtctttccccttagaatgggaacaagctccaaggagctggaatcccgaggcgtcctggacccgtccaggaagctaagggtgggggacgggaggggagggggccgggagccggcctccctggccccaacccttggtgagaagagggctgggggtataaagtccgaaagtgaggcggaggtttcagggttccgtttcaacaccatggacagcggatgcctcagactgggagcctaggaccgccctggggactgcccccgtttcattagggtgagggtccgattccgaccactggaggccaagggcaactgtctccaatgaagcggggctgctgcagcctggcctccccagccctccagcccctccagcgtccggcttgcacctgctgaggctgccggcacccgcaggcttggggcagcttccagagctttgcgcttggaacagaaggttccccttgggctgtggaggagtagagggcttgtgcgtgacctgtgagaaagaaagattgtccctgacacttgcgaagggcgaggaattgcggctgggaagggtcaggttgaagccgcaccaaagggggaggggcgtcctgatggttgaggaccggcggagtcggtgcgggcagaaccaacccgagttcctgccgcccttcctaaccggctgtccatgggctgggcagtgctggagagggtggaaaaggaaggaagcaggacctgctcccagggaggcccaggctctgctccgagggcagatggcgcaggggctgggttggccctaggaggaaggagatggggacagaggcctgccggccgcgccggcctgcgctccttgcagtctaaacaaaggccagcgggggaggctccggacggtgaggcttggggaagccactgatccctggccctagagggccagatcgggggcgccccaaggaccctatcgagctggcagtgactgcagtcgggccgtggagtgtcgcctgtgattccgtggtccctacgggcaagagctcccatcccggtctgaaactgtgagaaccgcaagctccgatgggggcggggaaggacgacctttaattcccaccccactgtacggagcccagcagggccatccgcaggaggccggcgggacccttgcctttctcaggactgagaggcttggaggaccgcggtgtgagctgcgcggcagagtgcgttctgcaggcgccagacaggagacgcgaacccgcggtcagggcccgagtgcgggtgcgtgtctgcgggtgccgctgggctgcgtgccggcgaggcgtgcgcgtggcgaggcgtgcgcgtggcggggtgtggctagaggtgtcaatgtgcagctggaggggctgcgcgcgtgggtgcaggagggccatgtgaggggctggagtgtgtgggagacaggcgtttccttgggtctccgtgtggccgccgggcgcagggcacggtcgagggcgctcgatggctgagtccgcgtgagccgaggagcgcgcggggcgggacgcggtgcgaatgcgcgggaggcacgaggcgcgcagtgcgtgtgtgcgcgtgtgcgcggcgcgcgtgccccgcagttctcaaggacacctcggggaggcagcggcggggccggtgtccgggtgacgtcaccgcgcgccccagtgataatcggccggtgccggagcggagcgcggatacgcgcggaggcaacggcgacggcggcggcggcggcgggcgcggggacagttgcatcggggccgggccgggctagcaggagctgggcgcctgcagcgtggaccccgtggacactcggctcgcagccggcctgcggcgctcggggacttgcctggctcccttctcggggttcccgcgcccttctccgcccagggcagcagcgcgcggggcccccgggagccgaagagcaggcgggaactggcggcggcgcgggaggcgcagggagcggaggcggcagcagcggctcccgccgggactggtaattacgctcggggccgggccggggcgagccgggcaagcggcctctctgggtctccccgtctttctctccacgaacagctcgagcgccttctcgcgggcccgctgcgcgcggagaggacgagctcgctgggttgtaaaaagagacgagttttcatctttgagcatcgagattcgttcttttaaccgcattcggtgcgcgctcctgggtcggcacgggcagggcgacggcaggggaaggcagctgcggaggagctcgcgccgcccagtcggagcggttctgcgcccctcggagccccgcgggaggcggccgggtgcgcacgcgctcaccacccccacccccggaatccgtcttcgcgattcccgggcgccccagctccaggaacgcccggagggacgcacttgggggcccactctctgccgcggaaaggggagaagtgtgggctcctccgagtcgggggcggactgggacagcacagtcggctgagcgcagcgcccccgccctgcccgccacgcggcgaagacgcctgagcgttcgcgcccctcgggcgaggaccccacgcaagcccgagccggtcccgaccctggccccgacgctcgccgcccgccccagccctgagggcccctctgcgtgttcacagcggaccttgatttaatgtctatacaattaaggcacgcggtgaatgccaagagaggcgcctccgccgctcctttctcatggaaatggcccgcgagcccgtccggcccagcgcccctcccgcgggaggaaggcgagcccggcccccggcggccattcgcgccgcggacaaatccggcgaacaatgcgcccgcccagagtgcggcccagctgccgggccggggatctggccgcgggacacaaaggggcccgcacgcctctggcgtcgcggggcgggtgggggcggccgagggcggccgaggggggagcctgcggccggggccaggctgcggccagccggcccccggccacgtgtgtccgcagcgcggagcgcccaggcgcccgcagagggcggcggggcccgggagacaaagggagggtccacggggagcggcgggcgggtgcgtggggcggcgggctagggtgcggcgctgtccgcggtgctggcggcggggcggcccccgcgggacgggagggcggccaagtgcggccctcgcccccacagcgggcgccctggacagttgccacggcaacgtgggaggaggtggggcagggtctgaggtcaccgctaagtctgcccttcctcgggccgctgcgccgcggggcggggcggaggcggcgctcgctgtggccccagagcagcccccgcagcccaggaccaggcttgcatggggacgggggtctgcgtccgcgtccagggtccaaacgagggcggtggacacgccggaccgcatcccgcccccaaagccggctctgggctgtgcaggaccaggcacgtgagactccgcagcccagggagaaaatgacaaatccctcccccgccgccatctgcagccgcagtgacacccactcgggtttgctgcaggggttttttttctgtccccggaagccagcgccacctgctgacgcccggcaccgcctctgcgccgcctcccccgcgcccatcccaggccccggctgggctgtgatgccccggtaacagtcagaggacgaccccctccccaaaagcccccttcccctggggcgagtgccagacctggctttgcagctttgcctctttcctcttaaccaggtagaggctgagcctctcctccccggcttcaatccgaggcaggagtctgagtcacctgaagttctcccagctccaggcccaaggcagggagcagaagatcaggataaaaggaaccatttgagtttcaggcagtggcatctccacccccaccaccgccgctgcagggccacaaagggaacctgcctctgcggctgtcctcagcacagacctccagcccctccacccaagtcgcctgctgcagacacaagcaggagccactggtgcctccatcttcccacccccaccccagtcagccaggcagagtcagaacacggtccaccagtctcctcaggggcaggttccccctggagggcacagaagtggcataggcagccccagcaagccccggcctgaccacaacactgaccccggggcttggcgtccccttcttccttcctcccgctgtgaggggacaggcagcatcccccaggggcacttctggtcctagagaaggggaaggggccccaggatcgttccaggacaacaccaaagggactggtgggagtggggtgttccttcggggtacaagatgtggccctagcctagctggagcttcctcttggagctctgacctccagcctggcccttccctcggagggaaggtggcccctggctgctccctcctctggggccagagatgggggctggggctttgttcttgtaccactttccttcctggggaggggacttggctcctagccagaatggaccttccatgtcagtagcctggggagggggacacttgagagctggtgggagcgcatgggcaaactgcccttggcactgtccctagacagtcagtctctgtggggtctcctaggaagagcttcctggactctgtcacggtcagggagctacctctcctgatgcctgcccccagtggtgcacctgggccccagcccccagggcagacttgtggcttctgggctggagctcagggggtcacaggaaggtgggcagcccagtaggtatggggcacacggggggaagctcactgcgaaggagctgcagagctgagtgcgcaccttcttgggccaggccttaccatagctgtagcaccgtctgccgcagtgcggggagggccccatgtgccacagggtccactcggacctgcagcagctgagctgctggcctcagtgagaggcccttggggcaggggccaccatcaccatgctttgcagccaacatggactgccctgcatgtccagctcagcctctcctcctcctgctcacacccgcagccacagtcacagacatgctcacacagtctcacctcccacgcacacacagacactgcccgcctccactcaggaagagctgggcacatacccccaactgaatcctcagcacccagcctgcattgggtcggctgccaggcagtggtcctggtggacagcaaacttgagccaagggcttgggacaccctctgaccagaccatgacacccagcaaggccagctcagggctatccagcagggccctccccagtgtgggaccagaggaagacatcccttccctgacccaaagatttttattctgaataaaacctaataaagctgctgaggctgaagccacaggccccacagtcccctctgaaattcctccaaatcccccggtccacgagcagcagaggtgggaggagctgcaggggccaggccacaatcagcaggggccagggcagccagtccctctattctgcagcccctggtctccaccttgatctcacctccaggtagggctccctgtgtggccattggccaggagcccccaccctccttcccctcaagtccaagccccctggcaggtctctggccagggcagagattaggagctggctctcagcctccctgcccctggctgcctcctggccgtgcccataagccgggctcctggcagtgatgaccccagagttcagaccctcacagcccagccttcacccctggtgcccagaccagctgctattttggggctgtgggtgccaggaacagttggcagctgggtggggtggggcataggggataatgtttgggaatgaattaaaaactaaaaaatgaaatgatacagggtgactccctccagcttattagagggatggagaggccttgcccgacagtgagagcacagagcagagaagtctgcctctgcttggtgaccctgtcccgaggtgccaggaaggtagcagggtcttctcaagtcaccgctagccagggacatgggccagaggcagccctggaatccagcaggcttggcattggtcctgggaccactcatgacatgcacgtgcacacacagacaccctggagccttatgtcctgtggcccccagggctgccacagagccagaaagcaggaccctccctcacgggcaccgccagaaagcaggaccctccctcacgggcaccgccagaaagcaggaccctccctcacatgcaccgccagaaagcaggaccctccctcacatgcaccaccagaaagcaggaccctccctcaaatgcatcgccatagccacactcctccaccctggactctggcctggcctgacggaggctgctggttattcaccagatggaggcccaggctccatgtcttcagccaccgtgccctgccccagcatcaagttccctccgcactctatttcctccttggtagaggggaaaaataaagccagtgtctcccacggttgcctcggggtaaccggtggcaacaccatgaatgagatcaagaagaggctctccaggggaagctgaggccagggtggggcccagcccggggctggggatgtgtttcagggggagcacggccaggcacccgcccccctccccccgcccctccttgccatcctcatccctgcagggctgagacacgcaggtcattccggctccttttctggaactcagcatcagccaagccatgatcgccacagagatggccacacccctcctcttctcagctttgcaacccccaccccagctggccaggccagatcccagaaggcagccctcaccacccagaagactcacagcaggaatacagggatacaggggcggaaataggccctagtgctggggaacaggactgtttcaggggagactcccccaccacaagccatttccacagatgctctgatggagccatggggttgggggccagctcaaagccgagggcagctgagccccctcctcagggccatgagtggtaaaactgagccagatggaaacatacagcccctctgcatcctcagcagatctcagcagacctggtcgggttgctcctgagatgctgtggcctctgcagctccttcattccctggctccccagccccgagtcactgccagctgggaacatgggccagaggcgccccagaatccagtgggccgggcattccagcctggtccgggggccgctctgccacacaagtttatgccaccacctctgaacacttgggaggcatgtgggctgggctagggcacagccactctggaccctcctgctgagagccccagctgagacacagacccttggccaaccccaggaatgtccagccctgtgagcaggatctgagccccacacgaacaaacgaccaagaccaggctggggaccaggcttccaggcccaggctgcacccagtccacacacacagcacatagggtcagtgctccatagtgggcacgtctctgcagggacaggatggagatgtccacgcagcacacagaccaagctgaggtaaagtctcaaagtacaaccatgtggcacacaaccatccacctaggggcacaggcagaactccccaacacacctcttggctacctcggtatgtgtggccaggccctcctgcaggtgcctgtacttaccacgtgagggcgccctggagctgccacaggatcctgcacctggacaggaatggggagacccctggcagaatcaggccccagaaggacctggagcattgcacagacacgaatgccgtctgcatgagcaatgtgtagaggcaggcccctccccacggggagactgccctttgccccacacacctcagaccaggggaggagggacacacgggggcccttgcacatcaggatgctctttgttcattcattcgttcattcaacagatatttctgagcccttcctaggaatggtgccacaagcaccaccaaggtccaggtgggcctgcagggacaggacctccatgggtagagagggtagtctgggctctgcctggaacccacctggaacagagtctggaacagagcgggagcatcctggtcacagtgggtgggaaggcggggccccctcagccattggtacaaggacacaagggcatgtctcagactcctggagtcaagacttcaccgctctgtgcttcccttctggaagctggagggtaagtttagacatgttcgttcagtaaatgtcagcggtcatcatcaccataattactgccaccatcagtaccatcaccaccattatcatcagtaacatcaccaccatcaacataaccattgccaccatcatcattgttatcatcagtagcagcagtggcaggagcaccatcaccatggaccctgcagagtggggccatttaaactccctctggctggtcctgttttcagttctttgaagcagtggggatgtgggagagatgcagatccactgaactgtggccacccaaaggtcactccatagacccatatacttctaggagggtgactgcatgctgaggacacaggaggggaagctacagggcctcagtgccatatcagcctggtgatgctcaggtccccgactccacataaggacagccctcctctggccacagaggccctggtcatcaccacctaagcagcccctgaaccagctaaccttggacagtctccagtgtcccttccccacaagtcttcccaaatgtctagagaatacccctgtcttggcccccaaaaggtatttccgtgacttcacacccagagaagtgcagaatctgctgggggcaggtagtcctgcttagaagacatagtggctaccctgggagagtggcaccccctgtcagagcccacctgccaaaaggctggagatgtcccaagagcctaaggaccaaacagcccacagaaaagcccatttccagccaaaccccacctttcctcatgtgcagaccccccaagaattacagacctgaggaggtgctgtggcttgcacccagacagagcagaaggcggatccttcccaaggggctcctgtttatctgggaccattatcatctttacattagttttacacggcccatgtgtgtgcacctgtgtgtggctgtatgcatatgtgcatgtgtgtattcatttgtgtgcgtgtgtgcgtgcatgcctggggatgcctgtgggcatatggtcatgcgtgtcagtgtgtgcccatggtagggcatatgatcatgtgtgtttgtgcattcctatggtaaggcacatgatcgtgtgtgtcggtgcacgtccatggtagggcacatgatcacgtgtgtcggtgtgtgcccatgttagggcatatgatcgcgtgtgtcagtgtgtgtccatggtagggcacatgatcacacatgttcggtgcatgcccattttagggcatatgaccatgcatgtctgtgcgtccccatgttagggcatatgatcacacgtgtctatgcctgctcatgttagggcatataatcacgtgtgtcagtgtgtgcccatggtagggcatatgatcacgtgtctgtgtatccccatggaaggacacatggtcatacatgtcggtgcatccccatgttagggcacatgatcacgtgtgtcggtgtgtgcccatggtagggcatatgatcacgtgtgtcggtgtgtgcccgttatggcatatgatcatgtgtgtcagtgtgtgtccatggtagggcatatgatcatgtgtgtctgtgcattcctatggtaaggcacatgatcgtgtgtgtcggtgcgtgtccatggtagggcacacgatcacgtgtgtcagtgtgtgcccatgttagggcatgtgatcacacgtatcagtgcgtgcccatggtagggcatatgatcgcgtgtgtcagtgtgtgtccatggtagggcacatgatcacacatgttcggcacatgcccattttagggcatatgaccatgcatgtctatgcgtccccatgttagggcatatgatcacacgtgtctatgcctgctcatgttagggcatatgatcacgtgtgtcggtgtgtgcctatggtaggcacatgatcaagcgtgtcggcatgtgcccatggtagggcatatgatcatgtgtctgtgtatccccatggaaggacacatgctcatacatgtcggtgcatccccatgttagggcacatgatcacgtgtgtcggtgcgtgcccacggtagggcatatgatcacgcatatctgtacgtgcccatgttagggcatatgatcacacgtgtctatgcctgctcatgttagggcatataatcacatgtgtcggtgtgtgcccatggaaggacacatgatcatacatgtcggtgcatccccatgttagggcacatgatcacgtgtgtcagtgcacgcccatgttagggcatatgatcacacgtgtctgtgtgcccatgacaggcatgtgtgttgtatgcacgtgtttgttgtatgttctctgtacatgtgtgcatgtatgtgcctgtgtgcacccagatgctcatgcatgtatgtgtgcttttgtgtgcacctgtgcatttgtgtgtgggggagtgctgaggtacagagagcagctccaaggtaggaaagaaccaccctgggccctccggactcccagaatgctcaggccctcctgcctggcagtctttgcccatgaggatgttccggctggaaggctcttctcatgctcccacatccctttcccaactcatccttcaggtcccaacttggtctgtctcagagaccaccatgtgcgtcaaagctctggcactcctggggcatgggctccccttggcctccacttcccaaagccgccccactctcaagtccctcaccagccactaggggtggtgactggcaaggagaggccagacagggattagtcaccgggtgcggctagtccacctccttctccaaccaggatccaccctcccaggccaggcaggtcctcctccaccccattctgacatctgcttggtggcatccctccccagatagcagcctgaggacctgtggagggggcaagagcagagcagagcaggctctacactgcctcatgcagggacccccggctgagtgtggcccagagtggtcagcccccaacatcagctgctccccatatggccctggggccaagacaccctcagggatgtcttccatcccaggaaggccaggtgggacaatttgccttccgggcaacacacattcctgcctcccagtaccctgtgtcccctgggcctccacccactgtgtagcacaagcatgtgtcaacagaaccctgtggccaggcccctgagtgtcaggaagtcccctagaagactgagctgcctgcccctggctcacagagaggtggggggcaaatgggggtctgcttggagcagggcagtggcagagagaaggaccagccccgaggggcttgggcatggcagggattgggcctgccctccaggtctctctggacactcttaccccagcccctggcctcctcaatgccacacttaaccaagtccccctcagaccacaaccccatgccctcgcctgctcctgaccctcagacacaggtgcccagctgccaatgctgttcccgcctcctgaaccccaaagtcccctcacctcctgccctgccctgacttgatgtggcctcacatcccagcctctgctctctctcccgtgctgtgcctgccccacccccacctcctgcaccccaaagtcctctcacctcctgccctgatgtaggctcacatcccagcctctgcagtctctccagtgctgtgtctgccatcaccctgccacctgcctccccgcctgttggacaacaagcaactgtgcttgttggggagactgcagacttcaggccccaccccagggctcagcagcctccagcctggccctcacacacccccacctccttgggaaaggctccaggacacatacggtccacaccagcctcctcctctgagctgccgtggccagccgtccttggcctcagatcatgttctgtcagtcctggtcccctggccccactcccttgaaggcagccagtgaccagagccccagaaggttcagttgcaggttccaagtgaatttagggatggggagactggggaggccctgctggagctgcataaaggcactttcagtgactgggggcctccatgctggccatggtgctgcctgtacttcatgcagcccagggtcctgcactctgggccctttcctgggggaggaaagaaacccagacatcagccctggggaggtggaaggaccccaaaaggggctgagccccagccactagccactcaccgatccaccggtgagcggggctggaaatcggcctccggcgggatcgtctcaggctcaggcacgaagcacaggggccctgtcgtaagtggaacctccatctgcagcaggtgctgggtgtggagaagccagtctcccgagggtggggcagggggtacggatggctgtcactcagaaggacttcccacccgggatggtcagtctcacaaacgacaaggagactaccctaggcttacacagaccccagggggcagggcccctcagtgcctctcaggaaggcagaaggggctgtggtcctggcccagttcctgggactcctgcctcaggctgcaggcactccctttactctgtgcacttgcagggatgaaacccacctccaactccacggactctactgcccagggcttccccagccacaaaggagagcttgtgcctgggacagcgaccacccccaggacagaaacaccccctcccgggactcctctaggacccactgtcccatgtgggaccgttccacaggtgctactcttccagggcgcaaatcccagcgtgctcctggccacacccacatcccaaagctctccggctgtccccaggcctgcagtctgctgcaccgtgctcccacagtggggcccacttccctgctccgccaggctgctccacacagccctggcaccccttgccccctgcccacacccctccaacctcgtacacaggcagaggccccgcccagcctccacccaagcacacccccggcctggtccacctgcaaaaccaaacctgctggactcgtcatttcccccaaccagcctggcttctccatgaacaacccccccaagttggggactgctctccttggtgatgacaagggtcccccactggtgtggcccctccagaccttgccacgacctcagtgacccccccattgtctccccatcctgcaacttgggatgttgaggcttttaagttgtcaaactagaacaactcgagatgaggacctcggcaggggggctggtgacaggaggatggatcgccaggaggatgatcgccaggaggatggatggcccagagctcagaagaggtggttgagggcccagccccaggggacccagcaggaagaagccagacaacttctgaggctcccactgaacccagaccccaccaggctgaggggcttgcacctgcggaggaggagggaggagtcaccctctgcagtaggcaggggagaggggtggagagcagtggctttgcatcctcctgttcttgcccagggctcccaaaacaaatgccaccccagcacacaaaccacacaggcacacagacacacatgcacacacaccacacaggcacacacctgtgcacaacacaccacagacataccacacaggcacacacacaggcacacacgtgcacacaccacacgggcacacacaggcaaacacaattgcacacacgttctcacacagacacacacgggcatacatacatgtatctacacatatacacgcatgcacataagcatcacagtacatgcacaaacatgcaatacacatgcagacacatacacagcaaccaaatgatcaaggaaagggatcaaaatattaacaataagtgaatctgggtgaagagtattctctatactatgcttactcttgcaatttttctgtatatttgactttatttccaaagtaagttttttaaaaaaggaatgccgtcacctcaccagccaccaccccataccaccccctcgaatacacctcaagcagctcttcttgatgttgggaccagagtccctctctcaccgctcctctgcagggatgcagtgtccccagctagtgaagacagacacctgtgcccccaccccagccccaagctgctgcttgtccctgcacctccaggtgctcacgcccagccccagggtgcagcaagcttcccaaaatataagggggagggggaagggaggccatcccatccctgaggcctggcagagcaagttggcctagggacctggtattctgaggccccgtcaaggccaccctcctgcacacctgtacccagactgaggaatgacctcacctgccacctgccaccatctttggagaaggctagggctacgttagcccagcttggacgagcccaagcagcaaactgcaccttgaggtctcctcccgtgatgagaacatcacggcagaagccggcacttgggggaggcaggggaaccatgacaccagctctggacgtcccctcctgtctgggctggacaccgaacccaggcacttctcaccccgaagcacaccattgcccacccctgtgccctggaccctccacagggccaagcgggggacgctgtcccagagaacctggagcctccacagggccaagcgggggacgctgtcccagagaacctggagcctccacagggccaagcgggggacgctgtcccagagaacctggaccctccacagggccaagcgggggatgctgttccagagaaacagctgctgcccacccacagaaagtctcctcttccaagcctgacagttccacaggactgaggcaacactcttcctggtctcacaagtggtggccaaagcccaaagccgccaagggcctcatcacctgtgcaccacctactccactcccgtcccctcggaagctgccctggggctgcccagcctgcaggggcccagccctgtccgtggcagcatgtcaaggctgccctcggccctgaaggagacccttcctaccccacagcttctcctggcaccaagcagtggcgctgcggtgtccgagctccccgtctgcccataggagccccgccatcacccacgggaagcagcactgcaatctccgagcctcaccctccgcaggacaccaggagcgtcagcatgctgccatccacagagccccgtgacgggcaagtgctgggctatggcttcccatagcttaggaccgacttcgggcggctcgccctctccacggccacagagctcggaggagtgcccaagaggcgcctctgtccaggatacactggaggcccctgtgcccaagctctgcccagacattagcagttgctggtccttctttgactctgggtggccaggacacttgcgggagggagggtgctggccccaaacaaccccacaggccgtgtggactccccaaaggcaaaggggccctgtggcagacctgtcctgagataggagcctcagccctgggccacagcaggaagccagcaggtctggtgggcacccctggaactcactggagttgaggcctggtcctgatgctcattccgacacctgaagcctgattagcttggcaagtctagctccctcttgcacgagctgagcgacgcagcagggcgaggcctggcccgtgcccaacgctgacgcttccgcctggtccagctggtgacaacgtatgagacacctaggcctgtggccggctgccaggaaaggagggaacctagactgctgttcaccatctgaataccccgtgacttaccagcaagcaggccactctctcacacctccaccagggtcgcctcccagataatccttctcagtcataaggaggaactcttgagaagagaccttccagggaggagcctggtggctcgaggagcctctgaaccgggcttttttttgctgtttcttttttttttgagacggagtttcactcttgttgcccaggctggagtgccatggcgcgatctcagctcactgcaacctctgcctccctggttcaagaaattctcctgcctcagcctcccaagtagctgggattacaggtatgcgttaccacgctcggctaatttttttgtattttagtagagacggggtttctccatgttggtcaggctggtctcaaacttctgacctcaggtgattcgcccgcctcggcctcccaaagtgcagggattacaggcgtgagccaccgcacacggctttctcttcttatcattaagcactatgaaggaataagcgagccttttttttttttttttttttttttgagacagagccttgctctgtcacccaggttggagtgcagtggcatgatctcgggtcactgcaacccccgcctcccgggttgatgccattctcctgcctcagcctcccgagtagctgggactacaggtgcctgccaacacatccggctaattttttgtatttttagtagagacggggtttcaccgtgttagccaggatggtctcgatctcctgacctcgtgatctgcccaccttggcctctcaaagtgctgggattacaggcgtgacccaccgcgcccggctgaggcgcttcttttttatttttttttttgagacggagtctcgctctgtcacccaggctggagtgcagtggcacgatctccgctcactgcaagctccgcctcccgggttcacgccattcccctgcctcagcctcccgagtagctgggactacaggcgcccaccaccacgcccggctaaatttttgtatttttagtagagagggggtttcaccatgttagccaggatggtctcaatctcctgacctcgtgatccgcctgtcttggcctcccaaagtgctgggattacaagcgtgagccaccgcgcccggcccaggcgcttcttttaactccagatgtgtgcacccgaaagttagccacagttacgtgatggagcaactccaggctgcagggaaacgtgagcgccggccgtggggatgcgcggggaggagggcgggccaccaatgcctcgcccacactgtgtggagtccacaggatggagacggatactgagggaagccatgagttgtggtctggtgactgaagtcacagagtaacggggctgccccaagctgggagccaaggtgcggactcctttctcacgggcctcctatggtgagatcacagcagaagccggcctgggcttacagctggtctccggccagagagggcatttctgtcctaccaaagactgcaacaattctggacagcgaggggcctggagggacaggattcagcccaaagtaccacaggccacacgtttcctccatgtcatcccctagcctggccatttaagacccaatgcagacagcaacctgcagagccagcctgtaacccaccagaagcccagagcacacttgggcttgcacctgagctaccacccagcccctccaaggaaacttctacaggcagaggcacctcaaactgtaaatccagctgaaggcttttccaatagcttgcaatttattatgacatttaagaattctagcataggccaggtgcacgggctcacgcctgtaatcccagtactttgggaggccgagacgggtgggttacctgaggtcaggagttcgagatcagcctggccgacatggtgaaaccccatctctactaaaaatacaaaaattagccgggtgtggtggcacgtgcctgtaatcccagctacctgggaggctaaggcaggagaatcacttgaaaccgggaggcggaggttacactgagctgaggttgcactccagcactccaccatgggtgacaagagcaaaactccatctcaaaaaaaaaaagaaaagagaattctagcatggtgggctttggggaggggaagagggaaaaaggaatagggctcatgtggctggcttttagggaggcaggtgtgagaaatactaacaacttacagctctttataaagcaaaatgagatgaaatccctcccccgcccccccaattctcactccacaaacctatgcctttcggttctcccttcccctggtaggcctggctccttgcctggcattaccatgcaccacgaatgcaggcaggaggccccaaacacccagacacggtgtcagttctacaaaactttccaagttggcagaaggagaagccactgcctcctccggtttggaggcctcaggggaggtgttgtctagaccgcccaatccactatccattcacaagccagtcagcaactaccacttgccagagtccctgccaccacctcccactctgtggggacaacagcatccacttcttccacaacaacgaaacaacaaagataaagcatggcacctgtcgtcatgcttgccacctttcagcacctctcggctcagcattctgaaagccgggaactcatctttaaaggaggccaggacttgaatacaagcaagaaaatggcataaaatgaaggaattagccactcgaggttgaaaacacacttccctaaaatgacagcagcatttggagctgcaggtgggagcacacagcctacctctaactggcctgtcagaacagacacgttttcccgttctcattttgtgtttccttaaaccaactactaacttctggcagaggtggtgactgcctgggaaagatgccatcctcatctggcccccttatctatcaagatgcaaactaataaaaccagcgggcgggacacccatttaacctgaaacctcctcttttgttaaaaatggactgaatgtgtcttccggttaataataaactttgctgggcactggaataaccaccagcctcctcaaccgtggctgctctcaaaagcagatgtggtgttccctgtcccgagaaggctccagagtatttggattaaggacctggatatgcagatcctactcttaagaattaacatttcctccctacccctcaaatgtaaaactggaaaaattaagaactctgtattttgcattgcattctcttaaaaattctgttaaaaaaatctcttcacagactgggtgtggtggctcgtgcctgtaatcctagtactttgggaggccaaggcgggcggattgcctgagctcaggattttctgggctgaggctaatattgcataactttatcacatacttgtcaacttctgcagatgtacacaatgtgcatttcactgcttataaattttacctcaaaaggaaaacaaactaaacaggtattaaactcttattgcataaataataagaggcattggaggatgaatggagagagacggtgaggagccaagtccagaaagggggtagcggtgcccaggtgctgcacgcaccgctgcgtctgcacattcatgtgatgaggggtgggtgacggtgccatgtagtttatagtcttaaggaaattaacagctccctcttccaaagcgagggaacgagaatcccacaccttgagaaacacagggctttctacggtgactccccgaatggctctgcagcttaaaaagctccaacacataaactcatcaagtagggtgaagaatgaggtgacaccaagtttgctaaatagtattgtttattaaggcttgtattctcctagaggaaaaacccaatgtcgtccaggactccattcaggcagtaacagttcagaggaagtgacacgctctaaatacaagtctaatgatacagctgaaacgttaactcagagggtcttttggagcaagtagttttcagaaagcgtctgctctctaggacggtaaggatcctctacaagggcacgtgcagatccaggcgctggagcgtcaggcatgggcaccattttcatgcttcaactcaaactccaggtggtagtgagctcaacggtccctcattccacaaaacatgacagcaaattcatcttctaaaaaaagttttgttttgtttttacccattcaacaggaaaaaaaattagacacacacgatgaaatttacaaccagcagcatcatccatcacactgtctgtactaccagatcctacacttaaagctcagcattattggtataaaaacttaagacggcattagaattcttaagaaaaggtgtaaaatttaaaaagatgtgcaaacaacaaagaatgcccgaccctgaaccagacctaaagcaccttccagttcctccacacatcatgccccaacaccatccagcccaatcggacaccaggacagtgagggacgggtggctgttcagtgggcaacagatctggaaggaaagattttcaaaaaaaaaaaaaaagtgtctgccaaatttgaaaaattaaaagttatctgtctagcagaaaaatcaaatgggtaaattagcactttagaccgataacagataataaaatgacaaatcagaatgaacaaaaaatcattaaccttttgatttcagtattttcaagagattttatcagaatactctaaatgacaaaatgactcatggtttcttatgtttgctaaaaagcaataaagggatgagaaatatgaagtctcacagaatatcaaatgactgaatttaagaacacaatttctgccaaaatagatgctttgtttttaaggatacttacatttcacattagatcagtctgattgataagctgacaaaaaaaatactcctttattagtgacttctacaggattataatacatagaaaaagtacaaataaatgcagatccatctgggcaaaaatcaacgacaagaaaggcaaagatgcaacactcaacccccgcacgggacgacacactggagctgaccaagcacacgtgttttaaactgttttcaaagtcaaacgttagaacatgtaagaaactggttcgccctcattgtttgtttcgactctgccgttcctgtaaaaagaaaaaacaaaagttgaacgcagagtaaccacaccaatgaatccctcccaaaagtgagatccgaggctgccccttagcagcacctgcaaatctggaggcgggaccctgaatggtacccaagccacaccagcacacaactctgagctgcactggggcctgctctgtgggggactggccacactgggcatggcattctccccaccccctctaccaggagaaaagcatcaaccacaacggtcacatgggccacctgtctgctgggaagcctcacttcccacagctgtctttccctcatgtgccactatcattccacatggaaagacacttagcaatgtgaaattctctgcactcagagggaggagctggcacgcaccaggctctcaaggaggccagggagacagaagctgttcttctgtattttatctcatttaaacttctcagtggcacaaaggacaccaaaatccttccaactggctaacaaggtgctgtgtcatgtggctaatgaagggcaggaggaccggtgtgggcctgtccagttcaggcccttcccactccccagctcactcccacgccaaggggaagagcatgcccctccccactcccccacggctagactggctcaaggcaaagctcctctgaccaggtttgctgcccactcccgtaagagaatcatcttttccagagtgtatgtgacacacaagcttgagacttacacccgaatcttttcccacactggcctccctgagtagcagggtctagaagccccttcagtctccttacaaggcagcatacaaagatgaaaatgtgcgatctaaggagcacacgctgcaccactctgctagagaggtgtcccaggccgagtgtggtggcgcaccctgtaatcccagctattcgggaggctgaggcgagaggatcgcttgagcccatgagttttcggctgcagtgagctattatctgccctgcactccagcctgggcaacagagagagaccctatctcgaaataaaaacaaaacaaaaagatgcatcccaggcacatccaccctcatctggccatctatcaagatgcaaactaataaagaaaaccagcgggcaggacacccaaacatttaacctgaaacctcctcttttgctaaaaatggactgaatgtgtcttccggttaataataaactttgctgggcactggaataaacaccagcctcctcaactgtggctgctctcagaagcagatgtggtgttccctgtcccgagaaggctccagagtatttggattaaggacctggataggcaggtcctactcttaagaattaacatttcctccctaccctcaaatgtaaaactggaaaaattaagaactctgtattttacattctcttaaacattctccgttaaaaaaaatctcttcccaggctgggtgtggtggctcatgcctgtaatcctagcactttgggaggccaaggtgggtggattgcctgagctcaggaatttgagaccagcttggtcaacatggtaaaaccccacctctactaaaaatacaaaaaaaaaaaaaaaatttggcagggcatggtgaccggcgcctgtaatcccagccactctgaaggctgaggcacaagaattacttgaacctaggacgcagaggttgcagtgagctgagattgtgccacttcactccagcctgggggagacagcgaaactctcaatcaatcaatctcttaacaaaagaggtactgctgttcctaaaaagcaaataccaatctcttgagttcaaatagctgatgttaaagccactcacaggtaaactccccagatccccatctcccttcagcccttataaacagctacaaagtttactatgtgctctttaaaaaatactattcctcataaaatttctcaaaaaaaaaaaaaatgacgaagcacagctcgttcttttgaggaatgctcaacaagcatccaggaaatgcttatggcctaagattctctatgctctttcttaatttccaaagtcaaagagccactctgctgagccggcctggaggtcgaagtggggtcaggtcaggggcacctgccgccagggcaaggacagtcagtctgaggaactaagcaatgctcacagtgtgggacgctcaccactttcactgttttaagctaagaagtggccgtttctaggtttttttaaaaccaaaaaatgtatcaacccaggacttggtctgactctgctgccataaaagctactgccatcctaagaaatcagtatgtttctaaatttatagctggacagcaatcttgcaaaatgctaactctacttcactttctcaacactcaacttgtttatgacctttacagcaatggggccaaactctaaatgataaagaaaaggtgggtctgttcttcgaagtcctgagagaaccttgagaaaaccgcccgggggctctaccagcacaggcgcacaaccctctcctcggcacactactttgttcttaaaactgcactgactcggccgggcgcagtggctcacgcctgtaatcccagcactttgggaggccaaagcgggcggatcacgaggtcaggagatcgagaccatcctggctaacacggtgaaaccccatctctactaaaagcacaaaaaattcgctgggcgtggtggcaagggcctgtagtcccagctacccgggaggctgaggcaggagaattgtgtgaacccaggaggcagagcttgcagtgagccgagatcacaccactacactccagactgggcaacagtgcaagattctgtcttaaaaaaaaaaaaaacaaaacaaaactgcactgactcttcatgggaaacccagagggagaaagcattagacacccagagtctcagcctcaagacacctaagactccaatcctggatgagccactagcccagcccgttaagcacaaggcctagagcaccttcgcaggcagggagagccagcagcgaagtccagtctggggacctcctcaaggaccacttccatttctctacactgcccaataagcttaaaagatatttgacgccgggcacagtggctcattcctataatcccagcactttgtgaagccaaggtgggaagactgtttgagcccaggagttcaagaccagcctgggcaacatagcaagacactgattctacaaaaaaatacaaaaattagccaggcgtggtggtgcacgcctgtagctactcaggaggctgaggcaggaagaccgcttgagcccaggaggtcaaggctacaacaagctgtgattaagtcactgcactccagcccggcagacggagaaagacctgtctcaaaaacaaaaacaaaaagctatttgaggcggggcacggtggctcacacctgtaatcccagcactttgggaggctgaggtgggcagatcacttgaggtcaagagatcgagaccagcctggccaacatggtgaaaccctatctctactaaaaatacaaaatttagctgggtgcagtggtgggcgcctatgatcccagctacttgggaggctgaggcaggaaaatggcctgaacctcggaggttgaggttgcagtgagccaaaattgcactactgcactccagcctggctgacggtgagattggctcaaaaaaaaaaaagctatttgaaattccaccaaacattaacaaaccaggttctcatttgtcactttcaataaaatgaattaatgttaacactgacccatatgggcccagagttctccagcttggctaacagtttaggggagggttaccaagttccttccaatgatgctccaccagcggctctgttggactcgccttggagcacccagtggtttgaggaacacttggatcttgcctgcaggcagatgcccacagaccctgcaggccgcttaccaagatgcttaacccataacccgacacacaaaagcagttatctagatcaagtttttataatgcaagttgtaggacactagagttttaaaaacaccaaccaggtcaggagtccgcacactttatgaaaacccaagtattacggtatttaagaagaaaaactgtgcgcgcacacacacacagccagcttccagtttagccagctaaggacctaaagcttcattagcaattatccctgcaactttagcaattcagtattcattttatacctaaaagtctgtaatccgagctattgtctgtaatcccagctacctggaaggctaaggcaggacaatcactcgaacccaggaggtggaggttgcagtgagccgagattgcgccactgcactccagcctgggcaacagagcaaaactccatttaaaaaaaaaaaaaagacctaaaacacagaatttcagtaactaattcagaattcagtaactggaaataaatgacatccacttcttttctcacaaaagagagggactgatacttttccaaagttctacaagccccaagttgttcaggacttgcataatgtaagactgcagacagtgcaggcggctctactctatacatccctatatatgccatgtacacgcctttctgcccaaaatacattaggacacttggtgctcacaggtgaataattcctttaacatagagaactgaaaaaaacactgaaaacccatctattatcaactgacatttcaggaagggatattttttaaaaagcaggagagaatctcaggatgaactctctcgaataaaggaagcattatgaagtatgtcagcatcatcattttcccattgctggtgccagtttacgggcatctgagcccttctgaagagcaaacacactcaatcccgtcagacatcacatgacagcacagactcaggagtttggctacaagtatcccaggaaatcaggactgtctcaaaaaggcccagtcaatgaatttttgatataggatccatatttgtcattataaaatgtctggattccaaacctaccccaccaccaccattttctttacgacctagatggagtgagtttgtttccaaaaactgcaggatactgggtttttaaaagaaaaataaagcaacgacctccagatcaaagaccagagattcccaactactgagggacagtgccctgggaagcaagggcccttggccaggtggggtctcgatgccctacgtgcccaccgcagtgcttcgtgaatatcacctaagtgttcctcatggacggaggctgggaagcactgttccagaaagtatcacaattcaaaaaggagaggagaaagttaccctcaaattctttgtaacagaaaaacagaatgtgtacactgtggtcccaattattcaattataattggaaagtgatcaaagtcgttcggtgacatctacccaaataccatcactggttactagcagtactctccgcagggaaagcccacgaggctgccaggacctgggcccgcccacctgcggccaactgggagctgcctgtcacgagactcagctcggcggacctgccgcatctgctcaccaccgggccacctggtctaagtacggcaccaaggacacatctgcatggcagttgcctgcaacacccagcctcaccttgcgcaccacctcctcctcctcctggcgcttctcgtagtgagcaaagtcgtcgaagatggaggttgtgtgcttgtaggaactgataattttcagcacttgcttggctttttctaagggcacctcctgggtgtcccgggagtttgtgaccggtttgttgtcgttattctccagcctgatgtgccggagctggttattgggtacatccttaacaaaaatccactggacatcaaacttccccttccacttgtcctgagaccagaccccggcactggtgccgtagtccacgggggacttcatctcggccaccccacaaaaatgcccactcccattgacgctgaagagcaggtagacgggccccttgctgctcatgcagcggaaggcgctgtccaggcgcttgttgccgtgctctgtgctacaccagatggagtacttaatggagcggtggatgtcgtcctcagagtagctcttgatgatgaacacacgcccgcttttcagattccactcaaactctttcgggttgtagctgtgagcagccttcagtttttcaaggacggggtgggattcgacgctgggggcagaattaggctggacgtttccaggagagttgctatcgctgccagcccctccgctctgcccaaacgccgcgtttctgttgcgtggggcaacccagcgggtctggggtggctgctgagggctctgatactgcggttgagccaaagctgggggctgtgctgggagaggctgagccacctgctggggctgtggggcagcctgtggagagggtgcctgctgggggactggggccttcggcacaggccccttgttatcccaggtgccaatgtccatgttatgctttatgggtggagggggcagcccaccccccatgacaggcccgctctttgttttcattttaggctgtggttttgcaggcttgctggcaatggcagcccacgaggtcggctttgaaactggcatgttcacatttgtcccaccgttgccagaaaggacaccagtcagtgccacgctgctgacgacagagcccaccgtcttgacggcggaggagctgacgtccccaatcttcaggccaaccatgccctgctccaggctgttcatcccgggggccttgctgagggtgtcgctgtgaaagcctggctgcccatcaaccaccgtgccacccagggagctcggggggtaggtgtagctgctcccatacgcggagctctgggtctgctgaccttgagacccacttgtcccccatgctgagaacgcagggttttcagggaaaaaattgaacctgtgctgatagatgttgttccccaggcccccaggctgcccaaaaacagcatcgtgcataaaatgatggtctccgttactgagctgtccgtaggtggtgaggtatggaatcggagggtcccctgcagtagaccacggagcctcattgagggagtaaggaaatccaatggacggcgggtaatagctggacaggtaggggtcgctcattgaggggtaactgttactctgcaaaagcaaacgtgacaagttacaccacttctacaacacgagatgctgagaatgccaaccgcctcttgcttaagcacaggtggagcaaaaacaaaacctgcacagcatggggctactccttccagaaagaaagctgtagtcgccaatgtgagaaccaaatcaagacagagaaattaataacgaacacaaaccagggtgccgtctcaaaatacgaagcatcattggcaaggctctgaattcaggctaaatgacgaagctatgcctctctagaactggcaaggtagcagccccctctactcttacctgcaaaggaatccagaggtagaggagtaaacccctgcctgctgacgacaacgcttatgacagacacggacggcatcatgggaactgaaacagctttgtaaggcagagatatttccattggcaaaccaggatgtgcagggccgtgaggcagtttgctccagagaacagaccccaagctcgctgattactcagcaggccctgggcgcccacctctgggccttgacattcctcctgggacactctcccatacctggaccaaagctctcccagaatccttcaagggtgcttcagaggctccttccacacacccttcctagcagatggcccctgcctctaagtccaagggggttcacattcccatgatttcctgggcacagcgttgggctcttgcagtaggcccctgcacagagggccctggctggctccagctcctcagccaagagaaagcatccgaagtgtggactctgtgctccgggtgcagagcagccctcactctggatgccaactcacctgggcttccttatgaaaacatgtctgtgtagtgactggaacctcagagagtggttttaaagtgacggaaccatgaggcaaaaaggtctgctagagaaggtgagtgcctgagtgccccatcgtaggggtctctgaagagctgcccagggcacaaatttagactgagggtcagcagttctgggacggcatctccttggagagactcaactaagggtctggtcatgattgggtccctccaacactgccttaaaatgactttcgtgtgaggtgtgtctgtatgtgtgtgcgcacacacacctgtacacaggccggtgagacggggtccagtgtgaggtaagaaggctcccacctagacgcatcgtctgagagtgccaagatgctattacagaaaacagagccggaagtaaaacacggggctctccagtctgtgacgcccgtttttggatttttagttttcccgctccccgccccccagtcccccaagtaaccagaaggttctacataaagagaatatgctccagacctcatctcacaacctcatccctgccacattgacctttcatgttggcatcaaaggctacactatgaaggataacagcacccagtcggggacaccaggtgggaaagtagctgaggcaatgagggagactgtgggatcccagacaatgaaacaggcctgcttcactggaggggtgaccacaagcagctctccctgggggcagtgccccaacaccagccaacactggtggactaatgaaccaatgacccggccaccacttcctgcctcctgctcccatcctagaatactgagggcttcagaaatccaatttattttctaattttcttcctgttgacttctccacttgtgagcagacaattccagaaccccccccttttttttttgggacgaagtctcactttgtcgcccaggctgcagtgcagtggcacgatctcagctcactgcaacctccgcctcccaggttcaagcgattctcatgcctcagcctcccaagtagctgggattacagacacccaccaccacacccggttaatttttgtatttttagtagagacaggatttcatcatctttgccaggctggtctcgaactcccaacctcaggtgatccacccgcctcggcctcccaaagtgctggaattacaggcatgagccacagcgcctggccccagaatcatcttttaaaatgcactaactgctgtttccccgtaatataaatttgagattctgggggtataagaagacaagtgggatgctatcagtgttccacaaacatgagattaatctgagcttattctccctcaaaacagtttccatgatgctggctcctttgctgcagcctttccctcgggtgctgccctggccaacaggcccagactgggggggtgagcgaatcaggggggcggtctgtgcacaggacttgctcctcgagtcactggccgcaggtgccttcaaggacggcaggcaaggggacagtcccccccacagggaagccagccctcctcctcccattagctggacacgtgctcctcagcagcgctgcaatcacaacacatcttccttccacgcaaaaagagcagatgggaaaaaaagacctcgatggctgtgtggtattctaatccacttggccccaacaccaaccagaggagtcaggccacagaaacagatgcccagggacacttctgacttacacctaaagccttaactaagacaggacatcacttaccacatgaaaaaatccacattacatgaggcatgtaacattcctgaaaatccgttttaagtattaaatggacacacctagcacacacgctgcacagacagagagcccataaatgacccatccagcttccctctacccaaggtgcagggcctgcagttctagccagtactctgcaaatccttcagctccagatcaccaccattcacatcctgagccacagaagacggtgacgctaatcagctctgctggcagccctaaaccctcctgatactttctgtgctcaccgggttccacggccacacaggcaggctggatacagtgacctggggttctgtgggccggatttccatttttacctcaatctcactgacagcccatttcctattacatctgccatctttcctccaaaactctgaaggtaaagaagcaggttaatttgtaaagctatgtgaagtcagtcattctgtacataagaaaacctggagatgctgtcctctgccttctttatgagccacatgtcaggctgctgccccacactccttccctggtgagggaagctgtcccattcacagtcctggtcacagtgcgtgggagacaactggaaacgcacagttcgggctgcctggaaaacacatgcagcctcctttcagggcctttgatctccctttgtctcccgcacagccaggcacaggttcagcgctcactcgctgccaagtgctggaggcgagctgtgctgctccctcaacattccttagtgccacggctccatgggcactgagttatgagtgtgaaagtttacttctcagggatacagctgcattaaccccgggcacggtgactcatgcctgtaatcccagcactttgggaggctgaggtggacggatcacaaggtcaggagatcaagaccatcctggctaacactgtaaaacccccctctctactaaaaacacaaaaaattagccgggcgtggtggtgggtgcctgtagtcccagctactcaggaggctgaggcaggagaatggcgtgaacccgggaggcggagcttgcagtgagccgagatcgagccactgcactccagcctgggtgacagagcaagactctgtcccccccacccccctccaaaaaaaagaacaaattcaaagcttgttcttaacacattactacctctgagcaagcatattttggtcctcgtaaatgagtggcataaacagatcttttaaggacaatacaagcaaaaccatgatcctgttactctgcagccgcctccacagaagactgctgaacacttccacatgctaggcgcctcactgcagcccctgcggagaactgacgacctcatcgaagaaaggctaacacatttttagccgggcacagtggctctggcctgtaatcccagcactttgggaggccgaggcaggtgaatcacaaggtcaggagttcgagactagtctgatcaatatggttaaaccccgtctctactaaaccgggtatggtggcaggcacctgtagtcccagctactccggagcctgaggcaggagaatcgcttgaacctgggaggtgaaggctgccatgagccaagatcacgccactgcactccagcctgggtgacagagtgagactccgtctcaaaaaaaaaaaaacaaaaacaaacaaaaaagaactaagagcagttttacatatttactcaaatttaaccacattaaaaaaaagaaacttccatccgaatgaccagaaccatttaagttgaagttcaatggttaagtttacttcctatatccatttttctgagatggagttggaatgaccaaaaggagagactagagggagaagcagaaaggatcccttcagaagcccaagaggaacagagagaagcatttgcttaataaaaacaaacaaacaaaacaaaataattaattatgtaaaatggaaaagtattaagggtactgctgaaaagtgagggagtgatatggctcctgggaagcagctctgacccaggactgggaacaggcctaccaggatgacctgttcttcaggagaagccttagggagcacagagaaaatgttagaggaaaataaccgaaaaaccctaatttacttacttggctgctcacttttcagatctgttttcaggactggtccctctgaggctgcaatttcagcccctcagctggtggcatcaatatgcagagacagcagtttctgacagaatttctgcatttgtttcagcaacttgccagtaagaagcacgttaagatcccactatgtccttccagctgcgtttctgggaagccgttgtgatggcaaatgcctacttagcaggcgctgccactgggtattttaaggaagcccatatttttagatgcagccacaagaaactgacactcccctgctggccctcaggtcaccccgggcccaccagagctgcccaggcacagcaggaagccctgtgccaagcatctccaggctgttctcaaagaagtcctagatgctctgatgaggcattgtgttcagtgaaaaaaaaccacccaaaacctgatgagcaatttcgtcactgtgtgatcagtgtcctcacacaaacagagacgtgtgagcatggaggcagtatccttaccacacactgaggccgtaacctgtacagtgtgtaactgtactgaataatggaagtaactgtacatcaatgataagtatctgtgtgtctaaacattatctaaacacagaaaaggtacagtaaaaatacggtataagaaatcaagaacgggacacctgtacagagcacttacggtgaatggagcaggtaggcctgagttgcactgggtgagtcagggagagaatgtgaaggcctgggccctcactggacaccactgtcacctttagaaacaccgtccacttaacactacactcaatttttaaattttcctttcttcaataataaaccctagcctactatggcttttttactttacaaactacttttttaaaagctttaaggtttttgactcttttgtaaacacaaatatatcatatagctgtacaaaaattttttttgttatatccttattccataagcttttttctattaaattttttttaactttttgaacttttttgttataaatgaagacacggccaggcacagtggctcatgcctataatcccagccctctgggaggccgaggcaggaggactgcttcagcccaggatttcgagaacagcccaggcaacacagtgagaccccatctctacaaaaaatcaaaaataaggcaggaagatcacttgggcccaggaggtcaaggctgcaatgagtcatgactgcacttccgcccaggtgagggagagaccctgcctcaaaacaaaacaaaacaaaaaaaccaaaaacccaaaaagacacaaaaaacacatattagcctaggcctacacagggtctggatcttccacctccacatcttgccccactggaaggtattcaggggcaacaacacacatggagctgtcatctcctgtcacaccaattgccttcttctggattcctcctgaagaacctgcctgaggctgctttacagttgactttgtttctagtaagtaggcagaatatgctcttaaaagtatagcaaatacacaaagtagtaacagtcgtttatcatcaattattacgtactgtatggtactgtacgtaactgtaggtgtatactctggtatgactggggcagtaggtttggtcacacctactgcagcaccacagacacgagtaatacactgccctcaacatggtagctccaacgtcaccaggtgccaggaatttttcagcaccatcatagtcttatgggaccactatcatattgtggtctgttgctgaccaaactgcatccggcagcacaggtacaggcatgcccagatggccttggtaatttctgtcagtgggatcacagcaaacacactcagtctgttggtcagggagtgtgcaggaagcctggggggccagcggcatctattcccaactcaggcatcatgccaagacagtgtcttctaaactctgagtaggaactgttctgggtcatttcacagtctttcctttcagaaaacaacagagaactgggaaaccagaagtccccgagcaggaaaagcctcaaaagagagaatcggcggggcactgtggctcatgcttgtaatcccagcactgtgggaggctgaggcagggggatcaccagaggtcgggagttcgagaccagcctgaccaacatggagaaaccccgtccctactaaaaataccaaaaaaaattagccaggcgtggtggcgcgtgcctgtaatcccagctactcgggaggctgaggcaggagaatcacttgagccagggaggtggaggctgcagtgagctgagatcgcgccactgcactccatcctgggcaacaagagcgaaactccatctcaaaaaacaaaaaaagagagaaaatcacaacaatcaagcccaacccagagcccttcactcccagttcctctgctcccccaactcccattcaagtcacagactagaagacagatactgagcggctacagtcgcaagcgcctcaggggcaactaggactgaaactctagcaccagaagcacagcaaggcgggtgaggcctctctgagggaaggacccccaccacacggcaacaacccctcacagcccattacaagttaaaccaacctaacaggcaggcattctcctaagactttctaaaccattctaagtatgacagtttcacacaaaacacggtagcctccaactggctactacaaaccatatctagatttttctcttttaagtacccagggttaggttgggcactagtggctcatgcctataatcctagcactttgggaggctgatgcgtgtggattgcttgagcccatgagttcaagaccagcctgggcaacacagcaatatttcatgtctactaaaaatttaaaaattagctgggcgtggtggcacatgcctgtagtcctagctacttgggaggttgaggtgggagaatcacctgagcctgggaagtcgaggctgcagtgagccatgatcacatcatgcactccagcctgggcaatggagtgagaccctgtctccaacaaaaaaggacccagagctattgatatgcccactatcttaactgtggccatggctccaaaggtatgtctgtgtaaatcaaaagttataaaaccatactgtatactctacatatggagctaagacacccactgacataaaaataatcgatttgtaaagaaatcctcccaaacaacacaaaagctccgactttataaaaatatttttggctgggcacagtggctcatacctgtaatcctagcactttgggaggccaaagcaggaagatcacttgagcccagaagttcaagactagcctgagcaacacaaagagaccctgtgtctacaaccaaccaatcaatcaatcaccaggtgtagtggtgcatgcctgtagtcccagctattcaggaggctgaggcaggaggattgcttaagcccaggaatttgaggctacagtgagctataatcatgcccctgaactctagcttgggtaacagcaggaccctgtctccaaaatacacacacacacacacacacacacacacacacacacacacacacacacttttaagtgtactgatgcaacctccctccccctttattggctaaaattcagtacataataccattaaagtactaaaataataagaacacactagaaaacaagaaattcaaaaaattagttaacttcctgccattacctctatccaaaggcccatcactaaagtcaagtcagttctgcccagaggaagggcagattctcagaaggcaaccaagagacaagaaacagaagcagggtcggagcgcggggcagcgctgccgaggctccacctgtacaaggtttcttggtctctaagctgcttgattcgccaagtgcagtaggagggagggggatgaaggaacattctaagaagttctaagacacctcagaaaagggcagactagttttattccttcacagagaagaggtgaagcctggttttactttaaagtaaacatgcccagtagctgagggctacttggagtggcggaggaaggaatgtgaatcacagcacacgaaatggagcactcagagcatctgctttgtgctgccccatgaggcctgctcaccaaagtgaggagctcacagaggtgcagcccctcatccaagccaacggcctggaggtaggaaagtgaggcaggggaagtctgattcccgagttggactcttagacataaacagataccgcttctcttgggagttttgctgcaacagcagcacagaggagagagagcagctcccagtagattttaaccagggcaactgtatcccccaaaaaacatccaccaagacagttttgcttgctacaactggggatggggagaaggagttgctaatggcatctagtgggtgggaagccagggaggctgctaaacatccaacaatgcacaggacagcccccaaaacagaatgttcccgtgcaaaatgtccacagtgccaaggcagagaaagcctgaattacctaagaaaacagggcagctatgactcactgggccctgctgtatcaggtactgtctcagcgctttatgtgcaccatctgatgtcatcctcccaacaattctacaaacagttactactctctctcttctacagaaaaggaaattgaggcaagagaaggcaagccatggacacaggccagtcagtggtggagttaaaattgaaaccaggctgggcgcggtgcctcacgcctataatcccagcactctgggaggccgaggcgggtggatcacctgaggtcaggagtttgagaccagcctggccaacatggtgaaaccccgtctctactaaaaatacaaaaattagctagacgtggtagtgggtgcctgcaattccagctactcccgaggctgaggcaggaggaatgcttgaacccgggaggcagaggctgcagcaggctgagatcacgccattgcgctccagcctgggtggcaagagtgagacgctgtctcaaaaaaaggactgaaacccaggcggcctctggctccacagtcgctccacagcccagctcttagctgcctccccagaccacaattccaatcatccagagctaagaataaccaggaagcttcagaaacacacacacacctccactgcgtcaaaggcaagacacaccactgacccacaaacactagagccaactagacctgtttgcatcccagccccagtgggatgccgcctcctccacagggaaaatcattttcaccccactgatgcccaaggttaacaggagtcacatcttcatgagcagtctatcattcctaatactttatagtctgctgctttgttgtttaggataatttaaaaatcagaaatgacagtaaaggtacaaaacaattaaaaccaacttaaaaacaaatatatgctaacaaaataaactcacctgatttgactgtccagtaaggtagggctcaaagtcattgtcatgaactgtatccttctgatgtaacgaaccattttgtactagaacaaaaagttgcaaaatattaccctcaaattttaaaagattacttttaagcttggaaggcaaagttagcaaagtctatttccatctatttctagcagaaattatgctttaattttaaaaggagtacaaccagtatagaactgatgtttatacaactaattagaagggggacgggaaactttcaataatttaggataaattttaaataaaggcttaatcgtaatttggtgagattaaccaaatcaagtgttaacacataatgcaaggaacacataaccagggtgaaaactgacatggtctaagaagacttatgtgtggcaaaaagaagtggagcctccaaaagcccaaatgcagaatgtatgcccaaacgtatggagaacggagggaagaaaacttaggagggaaggggctgcaactgaaggactgttgggagctattatctgactctccacagtgaaccccaaatatctgagacaggtctcagttaatttagaaaatttattttgccaaggttaaggacacacccatgatacaacctcaggaggtcttgacaacatgtgcccaaggtagtcgggggacagcttagttttatacattttagggagacatgagaaccatcaatgtaagatgtacattggtttggtccggagaggcgggacaacttgaagcagggagggggcttccaggtcataggtagataagagacaaacggctgcattctttcgagtttctgattagcctttccaaaggaagcaatcagataagcatttatctcagtgagcaggaatgactctgagttctgtcctttgtccaccaggaatttccttgtgggcaaactgtgggggaagtatgtaactttttttgtcttagaagctatctttttcaggaatagaatgggaggcaggtttgccctcagcagttctcagcgtagctttctccctttggctcagtgatttgggtgccccaagactggttttccttttacaccacttaccttcccactgttattatgctcagccagaaaaagcaagcaaaggtaaataaagtgctgggccttttccaatcttaaaacacgatgaaccgtatttggttacacctgagctgacacacaaactggctaaaaaagtgttccaagtaaacgtgaagtgtcacttaacagttttcacatgagtgcgctctgagggtttatcccaagccataatgtcacaggagatgctaacagacttggaaaacgggctgcaactaccggggatgtggagcttagcctgcagaaccttggactgcccctctcctagagcagcccctgctgggcggaaaaaggcaagtcgctcaacccctgcggccatgtccacccggctctcctacctccccttccccaaagcaaatccatgatcatgcggtggggagagacgggcccaaactactctgagcaatcatttattcacttcttgagaagcccctgtcttcgacctgtcaaatctcccagaatcgtcgcacaacctcaagttttatctccctgaagctggcggaagagagaaagtttccggttccagacgcagcttcctggaccgttccttccccgtcctcctccactccagcccgcgccggccgtcccgggactccgctcacctttattatcttgtccttttgttctctgcaccgccgcaggccgggacgtggggtacacacaacccgggggaagagggaaacacaaagttattcaccagagaactggtctccaacgggccgcgagctccgccggccccgacgcgcggtcacgtgcgaccccggccccgagaccccggtcccgcctgggcccggcctccgcgaccccgggctctgcgttccagccccaggacctcaacccagaccccgcgcctcggccccggccgcggcccctgtaacccggccccgctacctgggtgtccacgctggtggccgacatgcttcatgaacaactagacgcggggccggggcgcccgccggctcgggcctcccctagaggccgggcctgtcaccctagctcgcgcggccccgggccccgccgccaattccccgggcgccggccgggcggcggcggcggctgctgggcgcgcgggcccctggcgaggcggcagcggcggtgagcccgggacgcggacgcactgaggaggcgtcgactccaatggcggcggcggcggcgacagcagcggcgacggcggcggcaggggacgagactgcgcggcgtcagcgtgcacgcggggcaggccgggagcgccgcgccgggccgccacacttcgcgcctgcgcgctcccgtcttacgggatggatttcgctctcaggtcccagtctcgtgcggcggggcggggaccgcagccggctgggcggggaagccctgagccggggaagtcacgtggggcgtgtccggaggcgccgcggggcctggcgggaaggggctggcgggctgctgccaggtgtacagccgcccacacacaccccggccacagccgcacccccgacgcgctaccggcactgaggcctctgtagttttccccaaggtccgaagactaaacgctgttctggtccgacagctgggctacgggtctgtccggggtcggtctgcccttcccccgcgcgcaaacacctgcccgcccagagctccgagcccccgcgtgttccaggtcgcgcgcctcggcccttgccgcgggacctgcgggctttgttcgctttgcggccctggccttcagccgcagcggagccctgggcccggtcccggaggtcagctgttgtgtggatgcacccctggacctgcgagaggctcgccggcttataaccaagttctcatgttagattcttgaccccgatttcatcaccaggaggaaaagcagtgctctgtgccccagcctaggccgggccaggggacttgtcatctttgttcgaggatggacagccccttcttagcagcaactgtgcaaagagagcccagttctcagttcctaacccctcagcatccccaacctggacgcccttctggtcaaggtgttgaatttcgctccctgcagccagtatccaatcctgccacccttgtggctaactccctacagaggcttccaggttgatatttttctttccagctctggcagctgtaacatcttcacgtggcctggatctgggtcctgctaaaggagaaagacctggaatggggtgtcaggcaggttgacgtcaaatgagtgttttccacaaagtgggcccgggcagatgcgctaagcagggtgaacagtgacagcagggacggcaatggagtcccaagacggctccaagcctggacatccgcatcagtggggtagcagacagcctctcacactgctgcaggaggaggtggaaactgcccccagcaggccggtcagccacagagaggactgctgctccaagttgctccaggtctccctggagccctgcctcgcctaaagctggggaaagcgggctgggcttgtttccctggaacagagctgggggatgtctggtgccctgaggatgaatctggatcccctgggactttgatgtgtttgggccatgggcagacatctcaggccaggatgaaatctgtgcatttggggtacatccgaaaatgaacagcacgtttccaggatggtggcccacatggagaagatgtgtggggattgtagggacagtggggtccctgggggcaccctgccacctgcttctgtgtgataaggcctgcgcatcctgggcaggccctgagtgcctgcttcccaggacactgaactgtttggcggccaagactgcagcaagggggtgtctgggtggtcagagtagacactcggactcttggagcccctgtctgtcttctcacccagctcccatccctgggccaggacggtgcagtggtcaccactggagttcagagcctcacagccagttacagggccttcagcctcaggcctactttcctcctccgtggtgggttaattactcccctttcacaggatgagtgtgtggaagaaactgggtatgcagcccttggcgtcaggccagggctctgtcaacactggctgttacctgctgccttcacccacaaatgcccagccagtcacaggaggcagcactggccctgcgggaagtggccactccgagcttaggggccttcttagatggctgagtgccggcaatgcaggaccctggaggtgtttcagtttcctggagctatctcaacaaagtacccggaactggggggcttaaaataacggcaatttattctctcccagttctggaggccagaagtctcagatcagtattgctgggctgaagtggagacagaagctccttccagggccctcggggaggatcctagcctcctccagcctccggtggaggccgcagcccttcctggtctttcctcctcgcctccgtcacctcatggccttttcctctgtgcctgtgtctcttcttataaggacactcatctggatttagagcccaccctaatccaggataacctcatcgtcttgtgattatatctgcaaagaacctatttctaaataaagtcacgcaggtaccaggtggacatgagttttgggggtacactcttcagctcactacagagatcactggggaggcctcacagtgatgcctatggagagattttggagggtgactcctggggctgagtaggttctactcacaaatgtagatggaaggagaggcccccacagtgaggcctgaggaggcaccaccatgccagcctagccccactggccagggaagaggctggcaggatcccacagccactgcccggacccacccaggcttttgctgtgaactccagaaggctccatgctgaccctgacatggaaggagactgggggctgcccaggggcaggacaggtctggttggcgggaacagggggccctaaagtgaattgaatgcagggggtgtggcaccagcagggggtgctgaggtccccaggccagctctggggggaaagcctttatcttggccaggcctgaggacctgggagggtgtcacagaaaaccaggagttgagctgcctgtaaccttggagggccacgtccactgcccagcctgcccaggttcacaccccagcccagctctcggccaggaaaagggaggtcacccagcaccgaatgtcaggggacaactgtctctccctcacagggagcaggcagctcctcatgtcatggatggaaacggatcagagggctttggccactcctctgggtggcccagcggtcttgagacaaagcctgccatttctaagcctgtgccgtcaatgacagacaagagcccatcccctgtgggccgtctgccttcagacgggaaccttcttgctcggggaacctgttgctcatccaagagcccttcctagcagtacccgctcctggcagcaccctcaagtggtatgggattgtctaaacatgactagcattaggaaggtttgggtttttatttatttgaaagtcacacaggcgcatggttaaaaagctatctttgcactcaaaggatataaggtgggaagcaaaaaccaccacccccaaacccctcagagagggagccctccagatgcctgcctgtgcatgcaagcatgagtctctgtctccactatctgcccttgcatctcacgtgttgggaaaccgcactttggggatccacagtgctgctgagtatcaacacccgccgtccacccacctcgtccctctccagggagggcatgggctccagcctcatccagtgagtgtcctggccccaacacacatgcacacgtgtgcgaagacacctggcaggaggctcctgcccatggaatcactgggccaaaggcgcttacactggccattgtgctgatgttgccagatggcccccaaggaggctgtaccaaaacccccagccaagaggaggtttctgagctgggtgcagggtccaaacgctgtgggccctgaattcagatgatccctggctgaaccaaacccctcctgagtgctggacacagctcaccctgcagctggcctctgggggctctcagtgaagatacccatctgtctcgatggacaccagccactcacgcagctgccctctccacgaatgctgtctcaggtcctcatctcctccctcacctcaaccccgggctcatccccagtcggcaggcctccttccaaaaccgctccccaccgtactccctggcggggctgctttgtccttgatgaaactggctcctgctctcttggttcctcctgcctccctgtgccttgggagtgcactgacatggagtgtgctgacgtggagtgtgtggagtgcgctgacgtggagtgcgctgatgagtgtgtggagtgggctgacatggagtgggctggcatggagtgtgtggagtgggctgacgtggagtgcgctgacgagtgtgtggagtgcgctgacgtggagtgggctggcgtggagtgtgtggagtgggctggcgtggagtgtgtggagtgggctgacatggaggagtgtgtggagtgcgctgatgtggagtgtggggagtgggctgacgtggagtgtgtggagtgcgctgacgtggagtgcgctgacgtgcctcccatgatgcacggcactttacagttttcaaaccttctctctctaagcttctcattggaccattcaccccacaagtgtgaactgagcacatacttattatgtgtatggggcgtgggggcacgaggtggcccctgcccagcagagctcctggtgctgggaccttccatagccctacaaaggttcatctagcttcactgagcacctgctgttctccacacacggggacagaacaggccaggtgctgctcctgcaacccagatgggaggcagaggtagatgggtcactgtagatctgagctgtgatggaggcaggacagagaggagcccagagactcaggataggcaggcactcaccaaatgaggatgcaggcaggtgggcagggtgccccaggtggatggacagcaggaggcaggacacagcaacacctgcctgcccactggaaggtcaggtccctgagcaggtcccctcgtgtccactgccgagtgcaggtacagggaagacggctcagcacgtggaaggaagctctgcattgcatccagagagccgagggagttagagcaactctggattgctggagcagctaagcctctgagaagttaatgaaagtgtccaggccgcatagttactctggcagctccctgagctctcacctggtcctgagccctggcacctgccctgtccttggccctgctccatcggcatgacatcccccaggggccagcaacccagcctgaacagtaaagctcctagccccggtcctgctggtctgcaggcctcagctccctccctgcttttccaggagttgaaacagggcctctcctaactccactttgccaagagcctcttctcccactgcagagaactgtcatctgcctgtaagtaccagtgccaggtgctctggggccgatgtctccgttagccccaaggtggaggctcagggagcagatgtgagcgtgccttgctcatcgcagtagcttcggactgcagggattgcagggactgcagggattgcagggattgcagggattgcagggactgcagggattgcagggactgcagggactgcagggactgcagggactgcagggactgcagggattgcagggattgcagggattgcagggactgcagggattgcagggactgcagggactgcagggattgcagggactgcagggactgcagggactgcagggattgcagggattgcagggactgcagggactgcattgctcttgcagcaccacccgcctccgtggacaccttcagcagtgagacaatgcaggctctgctacaagaggtgcttactgggctctgctctggtgaggagaggcctcgcctggcagccagacagagtcccagcagggcaagatgaaaattcggggccctcgttcaaacagcaagagaaggctctttccttccttccagcgcccctccctgcacctgtgatggtgtttttatttgttatttaacgtcatgtgctcttgggcaaggggaggggaaactctcacaggcacctgaacctgtccctgtggctccatgcatgggccatgcccctgatccctctgtgcccacacccaggtccctgctgggatgagggttggcaggggtcactgggtggctaaacaccattcctgggggtggggggaggagggttgtgccaagccaggctcccagaccccaagtgcaggcgcatgccaccatctcatcagatggcactcacaaaacacagattcagacaaaagtgttaatatcaagatggtgacgacagcaccctctgggtgtggggccgcttgggtcacatcctatgaggccagccctgggtctgaaagacaccagaggagtccctggatgccaccaggactctggggctctaccagaggtcttcaaagagggggaccatggggacgactcaggctagaaagtggggaggaaaccatgccaggagggggaccagagagtaaccaacatgatcagatgacacagataggcacctgcaggctcaggcttcacagctagagctgcaggtggcccagaaagggaggccccacaatggctggatctacctgggccaggtgcctggggagggccacaggtgggacaggaatgagaatgggcagggctagctctggagaacaggacctggggttgggcggtgctacagggaggcgtgccgggtgctgagtactgtgctagcaaaagacgctgctgatttcatctgcccttgcaaacagcagcctctccccaggggagcacctgtcccaggatgaggaaggccacctggactctcccacccttccacgtggcttgctagctgtcttgggtgactctactggcctgcccggcatgtagctcccttcagttgagtgaccacattcctgatattctttcagggcgtcccctcctcaacccctgtggttggggatggatgcctcacctgggcctgatgccagtccagagagggagaagcaagtgaatgaagatgcttgaacaccaggatccagctgagtctgaaatggtccacttctgtgcttttggttgggtgaagcaatacatttcatttttagctttgagtttctgtcacctgcagctgagtgtcctgaccatagggacaagcataacatacgaacctcgggcctggcccacagttccacagaggaggagtgtgtctggacagtccagccctgctcagatccctcccttgttcccagcgcctcttggaccaggggctccaggtacccgtgcgctagccccacacacctctgcacccctgtctgcctacagtccccaggatgccagccacatgcacatcccccagggccacgctgttccctctgcctgaagccgcctgcttcacctcctctccaaagcttcgtgtggctcctcgagatctcatgctcaccctggggacacctgggaccactgggtcatcacttgtctgtagggacagctccaaggcccctggtgtcacctctgtgctgtcacctgctttatgtccagcagagggagctctgaatcaggagttaggtccttggtgtgcaccttccagctccccagggacctgcctcagtttccccagctgggaggcagcatgtggaagggagcgccagaggggctcaccccacctggtgggcattctgtaacttgtggcctgctgtgtccagcaggtgctgctattgaacctttgaaattgagaaactgccctttcaattttatttaattaaattccagcagacacacgcagctagtggctaatgtctttgacggccaagctcagactccaggcactgatactcaacgctgatccttcacactcccagaaagctttaattaacacacatgtccacccctctgccccccaccgacccccagcagagaaatcaaagtagtctggggtggagttggtgacctacatggtcaggaggcctctggttgagcctgaaacctccaggtgagcctgatggctgcacatgtgcctagcactctgcgaggttggcaagctcctaagacctgctcacccaccctgctccctctgctgcgtggagctggggagtgttcagtggcccctctcactctgcgtgtggagctggggagtgctcactggcccctctcactctgcatgtggagctggggagtgctcactggccctgctcactctgcgtgtggagctggagagtgcagtgtccagtttgcctcttgcagcctcttgcttccccttccctctccagagtcctccctgtggtcccagagctccctgatctagcctttcctaaagctgactcaaccacctcctggattcccaggctggaatctggggccagagatggtgcatctcatgttttcaaatgatgcccagaagctcacagatagcagggctgttcggtggatgtctgggctctgcaggattgcgggaacagaggcctgctgctctcatcctcccgccctccccattaatacaggccttctgtccatccctggccctaggtggcctctcagctcaacttcacaagccacaggggcttgggaagctgcaggaaggagccaggcacagctgtactaaataagcttctccccacccctgcccccaacaggcctgggccaggcatgccaggaaaataaatcagactaacggacccaggtggggccacagccacgggaggtgtggtccagacagctgccgtggcactgaggaatgctgaccatccagactgagacccatggtcgggtcagcatccagcccagcccagtccagcaggtggggagaagcccgtggtggggcctgctctgggcccacgctggtcttctcaggacgctccctgctggcctcttgcaactctgcctgtggctctctaggcgctggctgggagccagcgctcaccgcagccaaagcccagagggatggacttgcgccaggatgctggccccttggcaggatacctggggagtccctgggctctgggaggccctcagcggggtgcccagggcagtgacccctcgggaacatacctactgctcatttttgttttggggtctgctctggagagctccacctaagactcggggaggaagctgtaaaccaaaaagcatgagaggcagggctcagtcgatcgagacgtttattttgccaaggttaaggacatgcctagaagaaaagcacatggagtcacatgtccttttagtctgtggtctgtgcctttctccaaagatgcttttgagggctccaccatttaaagggggggaaagcaggctggaggggcaagagggaggccttggtaatcacatgctgcaagagaagaggagcaggcaggggaatcgtcagctgtgtgttcctctcatgctcggaaacctgcacttgtatgaaataaggtgaacgtctcctgtagagatgcttcacctgttatctgtaactacctgcttaggaacaaaaagaaaggcagcttctcacatgacttagcttttagtttaatttttttcttgtggcagagtgaattggggtcctgagtttgtttttgtttttgtttttgtttttgttttgaaacagagtttcgctcttgttgcccaggctggagtgcaatggcgtgatctcagctcaccacaacctccgcctccagggttcaagcgattctcctgcctcagcctcccaagtggctgggattacaggcatgcgccaccacgcctggctaattttgtatttttagtagagatggggtttcttcatgttggccaggctggtctcaaactcccaacctcaggtgatccgcccgccttggcctcccaaaatgctgggattacaggcgtgagccactgcactggccttgttttgcgatggagtcttgctcttgttgcccaggctggagtgccgtggtgcagtctcagctcactacaacctccgcctcctgggttcaagcgattctcccacctcagattcccgagtagctgggattacaggcgcgcgccaccccacccagctaatttttttagtagagacggggttttgccatgttggccaggctggtctccaactcctggcttcaagtgatccccacctgcttcagccttccaaagtgctgggattacaggtgtgagtcaccgcgcccagcccctccagaccatctgaaaacaggaaactagccagcctgcctgtctcacttcgagcttcttaatgccgttgccagcctcagaagctggaagcccctcctgtgggcctctgatgcacttgtccggagccctgcggtcccctggagtccttgctctgtggccacagggagggttgctccagtgctggcaggctctggccccccaagctgaggaggaggggaccggctcagccacttttggtgagggcacttagggttgttcagcaggagtggggctgggtgcgggagggttgcctgtcacaggggttaccggcccaccttgcccagcatacacctgctgagcttcctgggaacccaggcctgaggcctggacaggaattggagcttctcctcctccctcccacctctttcctcctcttccctcccacccctttcctcctcctccctcccacccctttcctcctcctccctcccacccctttcctccttctcctcagcttatgtgggctccaggtccagcctcattccagccggcacggcccggaggtgagcaggacctggcctcatgtgactgcaaccacaagcccagactttcgttgcagccactgacccagaatcccaggactgccaggactggacggcccagacgcagtggttgtggggcccacaggtggaggcaggctggaccccgccccaaggttttcccgccacaaacagatctctaagcaggacatgggcaagggtggggaagggaacccgagatcctgcagtaccacaccaggcccccaaggcccctctgtcccaggccctcgtcaggcagatctgggtgtggggcatggccatgccacagcaggccaggatggtgaagcagcccggcgaatttcaccccaaaatacgtgtgacaaaaagagccaaactctgtacaatatttaaagggtttattctgagcctaataccggtggccatggcctgaggtacagtcttattatgtcttgagcacatgtgtcccggtggttgggtgacagcttggttttataccttttagggagacatcggcatcagttagtacatgtgaggtgtacattgctcaggttcaggaaggcagaacgactcaaagcagggggtggggccttacgggtcctgggtgggggcttatgggccctaggtggggctttacgtgtcctgagtgggggcttacgtgtcctgggtggagccttacaggtcctaggtgggggcttacgggtcctagttgggggcttacaggtcctaggtgggggcttacgggtcctgggtggattgtggattcaaagatcttctgattggcagttggttgaaagagttaagttattatctaaagaccaataggaaggagcatctgggttaagataaggggttgtggagactgaggttcttactatgaagatgaagtcccataggtgtctgtccttaaagacagtagatggcaaatgtttcctatgcagacctttagaaggtgctggaccctcaggtaacctcttcaggattgggagggcctggaaggggaaagagctagttatgttaatagagattccttacagacacaaattttcccccacacaagatggctttgcagggccttttctttctttcttttctttcttttttttttttttttttttctttgagatggagttttgctcttgttgcccaggctggagtgcaatgacgtgatctgggctcactgccacctgtgcctcctgggttcaagcgattctcctgcctcagcctccgaagtggctgggattacagccatgcaccaccacacctggctaattttgtatctttggtaaggacagggtttctccacgttggtcaggctggtctcgaactcctgacctcaggtggtctgcctcccttggcctctcaaagtgctgggattataggtgtgagccaccgtgcccggtcttgattttttttttttttttttttgacggagtctcactctgtcgcccaggctggagtgcagtggtgcgatctccgcccactgaaacctcagcctcccaggttctagcaattctcctgcctcagcctcccgagtagctgggactacaggcacacgctgccacgcccggctacgtttctgtattttagtagagacagggtttcaccgtgttgcccaggctggtcttgaactcccgagctcaggcaatccacccgcctcagcctcccagagtactaggattacaggcgtgagccaccacgcccggccaatagggcctttccaaactatggcaaagaaatgtatttggggataaaatatttttctttccttgtttgtcatgtgatattatgccagagtcaggctggcattcgggatcttacagtctgtttagtcagtttggtgttttttttttttttttttttttggagataggatctccctctgtcatcctggctggagttcagtggcccagctcagtgcagcttggacctttctggctcaagcgatcctcctgcctctacctcctgagtagctgggaggacaggtgcacaccaccacacctggctaatttgttcttttgtttgttttgagagatgaggtctcattatgttccccaggctggtcttgaactcctgagctcaggagagcctctggcctcagcctccgaaagtgctgggataacaggcgtgagccactgcgcctggcctgttttgtcaggcttaagagctcgattttaatgttaacgctggtcagtcgttcctgaactccaaaaggaggagggtctcacgaggcctgtctggcccccaccttcctgtcatgggctgaacttgtttttcagatttccttgagtaccgttggccaagagggggctccattcagtcaactaggggcttggaatttttttttggctcacatatggtgcccgggcgtactcactgctctaagtcagaggccactgaagggcggcagatgctggaagaggctctgctgtgattttcccttttctgccttagggccggccccaccatggggaagcgcagtcaccttccaccgcttccctgaaaccccttttctgccttaggccgggccccaccatggagaagcgcagtcaccttccaccccttccctgaaacctcagaaaagagggcagcagcaatgcagccttacctggacggacctgtgccccagataatgtctcctctggaggtcattcgaattccaaagggaatcacttacaagttagttcctgtctctggagtccctcccttctccccgaagatcactcatgccccatcaaaagaaccgtccacactccccgtctcccctccctgatgaagaagggtacaggagcactggcctcccggcaggttctcaggccatcgccctcctgcggccccaccccacgcgtggggatcatgtctcccccggcagcggctgccgctgcctccctggacaggcttcctggccctccatctccgctctcagccaactcattgtgcccctctctgagcctcggtttcctcacctctgaaataagctctgtgcccatctcgaagggtaactgaggagatcagtgagggaatgtgggtgatggccttagcatagggcttggcacactgtcctggttgggaccctcccagtgaatcccaaagcaagctgacatctagctgtcagagaggagaccattccttatattgtcttatacttaatttcttgtttgctgaaaaagtagaagttagaattggcagaagtgaaaaatcacagacaactggggaccacatttcagacctggtgttaaaattcaacctctgacctcagggcttgtgctatctatggattcagacattgtgtaaaaaagcatcatgaaactccctgttctgttctgtttcgttctgatcattggtgcatgcagcccccagtcacataccccttgcttgctcaatagatcacgacccccgcccccacagcccctttagagttgtgagcccttaaaagggacaggaatcacttattcggagagctcggtttctaggacgtgagtctgccgacgatcccagctgaataaagctctttccttccacaatccagtgtctgaggaattttgtctatgactcctcctgctacagctggagggaaactctcttccttcctagccccagttgtctctttgtaactatgatagtttgctgccgatggacacggcaagtctgtatgctgagatgctgggttgcagcaaagaaggggttaatcatagggtcactaaagaagttgctgggagggaacctcaaatccatctcccagaggaatctggggctggggtttgttgttgttgttgtttggtgtctgtttggtgtttgtttgtttgttttttgagacagtcccacgctggaattcaagggcacaatcatagtgaaatggcaaagatttccttgtccccttgcagggcctgcgatggggactggctcgcttctttggggccccgctgctcaaacccctaggggagcatatagatgggcagggagccccacggcagcttctaggggtgaatgtttacagctgaacctccagtgggcatgtgctacagggcactctcttagtttagccgtccgtaggtggcttgtgttaaccagctcagttaggcctctgccttaccgcaaggacagagggctttctgtatcccagggttcttgctgtgccggaagaatcagatcacacatgggcttggagaatgagtgcaaagtttgattgagtggaagtagctctcggcagatgggggagccagaagggagatggctttcccctggaatcaggccgctcagcagccggggctctcctccaaccatcccaaccaaactctgcatcgttccactagctgatcgcctgccggagtctcagtgtgctcttctgccggcgtgctccccctgatggcctctcgacgtccagccgcttgtgtgttctgccaatgggctcctctccgtgtccagggcttaggtgcctgcccgctaggtctcagggtttctataggcaccagatgggggcgtggcagggcagggtggtcttgggaaatgcaacatttggacatgaaggcagggtgtgtctatcctcacctaggtccgtgggcacaggcctgtgcgtggagccctagccagggaccatgccctcctctagccagcacttccctgcccaccactcctgcagccttcaactcctgggctcgcataatcctgctgcctcagcctcctgagtagctgggaccacagttgtgcaccaccatgcccagctatgtttttaaaatttttttgtggagatggagcctcgctatgttgtccaggctggtcttgcactcctgggttcaagcagtcctcctgccttgaggctggggttttccagagttttggagtgggccaaatgtgcagatggttgattagtagaaggttgcagggtgaagccacaggacagagtgaagaagctgttctcatgtggatcccatccctccatgagggtcttcaaactggttgctggaatttggggtctgaaaaacatcttaaggaatcaacaaaagcctcatgactgtaatatcagggatcgcatctgtgggaacacagtggtcacgaccgagggcaacgtggtgatgtttagcagcgagaaagcgggccaccgtgcagtctgattaatgcttaattataataatatttctgtccagaacccgacatgcaattcttgtcagccctgtggagacagttttgttacaggaaaggggtccggatccagaccccaagagagggttcttggatctcctgcaagaaagaattcagggtgagtctgtaaagtgaaagcaagtttcttaggaaagtaaaggaatcaagaatggctactccatagtcagagtagccctgagggctgctggttgcccacttttttggttatctcttgatgatacgctaaacaaggggtggattattcatgcctcccctttttagaccatctagggtaacttcctgatgttgctatggcatttgtaaactgtcctggcgctggtggagagtgaggacgtccagaggtcactctcgtgaccatcctggttttggtgggtttttgtcggcttctttgccacgacctgttttatcagcaaggtctttgtgacctgtattttgtgctgacctcctgtctcatcctgcgacttaaaatgccttcaccgtctgggaatgcagcccggtgggtctcagcctcattttaccattttacccagctcccgttcaacacggagctgctctggttcacatgcctctgacggtttcaccttctgctcagagcatttggacctccacaggctctgactcagccctcttatcccaggctgatcccatccccgtctaaaaatcccactaacttccttctgagaaagttgagagtcttgtttatactaaagtgttaatgactcacaaagcattcccagaggaaaagttaacaggaggagactgtgaggctctggcggtgaaaggtcaggcatgagccctgggggagatgttttcttctctggaggcccctcctgagaccccccatctctgcacaggaagacgaaccctgtgcccagcgggtccacctatctgcccacgtggccccaaccccaggcttcatggagtagagcagggctcattcgtgtggcacccacacgcagtttcagggcgtggactttcccggatggctgggtggctttgggggaggtgtgagctgttggtggagaatgctgagcccggccctgacgacggtcctcttttcctgccttaataggctagtccccatcactgtggggggcaatttggggatattctcctccaactcctgctggttctgaatcttgcagggagctgcaaatcccagtcactgtggggtcttggggcttctaggagtccctgctgggcccagggcttttttctcactgacctggaggcctctccccacggctccccatctgacatcttctcagctgggagacttaattgtaaagactcacagggatccagggggcatcacagggggccctcctaggtactgacagatgtttattcattttgaaaaatgggcaaatagcaaataaagatgtttagggtatgtttggaagaaaacagcaaaatagtaacagcagtgcttaccgctcagcggggagaaggcatatgggttttcccagcttttatttggaaatcattgtagatgcagaattgcaaagaagcctagaggtgtccatgcaccctgccccaccccacggtatcatcctgcaaagctgcagggcaactgccaaatccagacacacacgccccggtgcccacagggatggctcagacatcgaacttcgctttctttatactcccagtattcccgacacttctggaataggcacatgaccattatttttagctccttatttctttttatttaattaaataagcaacatatggatagtccttgttttgagaattttgggccggccgcacacggcaaagcagctgagcgcccctcagcagctccctgcacagttacgcactgggatggcactgcgatgcgtgtggagaaacacctgctgggtttggaggtgcacaggacctcggggcgatcccaccggaggagcggggctcggcttatggcccagctaaccccaactccccagtgggccccagggcctttccttccacttccaggagtgacaccaaccttgtctcctctccgagccccaagcagtgggaagagagggtcccataacaggccatggcagcggcctctgctgcctgcccacctcagagggtccccagcttgagagttcagagcaaacctgggtgctgcatgtgtctctcccctggaagaagcaggctggagacagtggcccctcttcccacctccccggtgcactgcgggcagactgggaaccaggcagcaaatccacccagcttgaggcccacgtcctcctgaaagggccccaggcccacacccggggttttgctgaagtgaccaaaggtaaccgctgtgctgagggggcggtggaggacagggagggggcgaaggcgaggtgggcgctggaggacgtgggggtgaaggcgaggtggtcgctggaggacagggagggggcgaaggtgtggtggacgctggaggacagagagggggcaaaggcgaggtgggcgctggaggacagagagggggtgaaggcgaggtgggcactggaggacagagagggggcgaaggcgaggtgggcactggaggacagagagggggcgaaggcgaggtaccctgagatcatcccagaaaacacactgggaagttctaccttgtgtctagcctaactcctttgctggccctcaggccctttcccgacagccctcccctcctatgcccctgagcttcctgctgcctctccctctgcgccctgcagccctggcttctgggctctatcctcagcagggcctgcagacaccccagaggccttaagagcctgggaggggtttccagccacacccttcactttgatttctgcaggaaaccaggtggctctgggccttgcataggaaagggttgggggtctcgctggggcctggcaacactggcctgagtatgaccagaacagtcaccagaggcctcctgggagggcgggtgcagccccagcccccgccgtgagtgggggtcggggggcaggtgtgaaagtgtggtgggcagcagctgggtctatgcggctcagcagtgggaagagaacgggccaggcttccaggtgagctcagggacggttttcactgcagctaaccctctcctgcccacctgcgctccccgtggcaaccagcggccctgcagcgtgcgactcctctttattcttccaaactctgtgagcctgcacgctcccatccaggacggaacagcaggggagagtggctgaaggatgacagggggcttttagggccagccgggtggatgagctgggtttgctggggttgagggctcagtcgggggttggggggtgtcgaagtctgggccccatccagctgtcctttttgtcccgcccaggtgtccctggggttcctgttctgcccctggcttctctggggttaagtcctcctccctgttccctcactgtggggtttggcagtgtggcacagtgtggagcttggaccggcagccagggtcacagcagacctcaggaactccgattccagtgccaacactgagtactcctcttttgggggcatcagagcctctcccttggctacctggggaggctggtatggagggaggtggagggagatgggggaagggggagcgggaggtgagggcagctcgggcccttctttttgctctgatcttcctggcctgaggacaagagctgctcccagacctgcagaggccccttggggcagagggatgtttcagagaacagccgggtgacctgcctccctgctctgcgtgacgcagccctaggcccctgtgaggctagagtcacccccgcaaggtgggaggtcacggcccctgcctgcacaggcagcacagctcacatgtccttccttgagccttctctgcttccggaggctgccctgggcgcctgaccttggagccatcatctccagctccccaacccctcccccacagccctggggcagacaccagcctggggaggggtctccatgctcagttccttcccgtcttgttcagagagacgtggcctgcccacgtgcagtcagcggcatccgcaaccctgccaggggccccgtgacacgcccccgctgcacagagcatgtgaccccagaggccaccctggccacttccagaaagctgtgggccctgggatactcccctcccagggtgtctggtggcaggcctgtgcctatccctgctgtccccagggtgggccccgggggtcaggagctccagaagggccagctgggcatattctgagattggccatcagcccccatttctgctgcaaacctggtcagagccagtgttccctccatgggacctaaagacagtgccaagtgcctgcaccgtggaccacagccgagccactgggcagccggtgatggtcccacgcaggagcgctgtggaccccgctctctgggcagccctgtcctaggcctggacacctgcagagcctgggaccacgtggatgggcagatcctgggccagctgcggcccctgacagaggaggaagaggaggagggcgccggggccaccttgtccagggggcctgccttccccggcatgggctctgaggagttgcgtctggcctccttctatgactggccgctgactgctgaggtgccacccgagctgctggctgctgccggcttcttccacacaggtcagtcccgggcgggggggccttcctgccgtgggcctgggcacgattctggacccttccagcccagggctctgcctcctccgtagcatccatcccccaacaggaagggtctggcctgatgacggagcagtggtcctgcaagcccctccagtgcccatgggctcgtgcctgacaccctcccccggagtctctgctggctgagtgtttcagaccgtgggatgtgaggaggggctgcctctggccacagtctgagggtctcagctgtggaggccgccagcttggtgcacaagtacccctttgtgatagaagtgggtggggctgacattgcctggggccctcaccttccccgctgctgttctgcacagggagaggagatgtttaaagaacaggatcagggtgaccaaggcaggcagtggtcagccagaaggtcctggatgctcagcctgtggggaatttctccaggccccaacctgcagctactgtctggtcttccccaactgaatcaagtccccggagtacctatcctagtcttggcccgggcctgctcctctgccctacagctgcagaccatgtggtcagacctgagttcaggtcccagctctgccacttcctggctgaaggacagggcagcagggcccaccgagggctttacaaatactggcacagccatggtcattgtcagcagtgggctctggcggggcaccatcctggtaaggctggaccaacttaagacagctggtcggggggacagtggctgggacagtcagaagccgtggcgtgaaggggcaggcccagctcacccacctccctggaagtccaaggctcaggaggcaaaggccaggcaagaggcatggcaggtgcagagccggggtctttggggctggtagaggtccagtgcccgatgcagcccaaacctgtgatgtcagtggcaggtgacgtatcgcatggatgccgatgaggggacggggtcgccaggaggtagagagatgacgggtcccccacccccaaagggaggcatgagttcctaaaagcaagcctggccccagactggccttctagggcagcctcccttcttcttctcactgggaatccatcttggggaagcagagacctggggaggggcccttctggctcctgaagccccagggctatagatgtaccaagccctggggggcccccactgctcactctgggaacaatgcaaatgccagctcagtcctttcctgaacattctcgcccatcctggccggcaccccagtcacccttgtccccttttcacctttgatgctaatgaggtacaagtgacatcccccaccaagccccctgcccaccccctcctccttcttgccacctgggagctcccctccagctgaagctctcatagccttggaaggacacaccgggggcccggggactgggtgggacttggctggggccagcatctctccgcaccccaggccatcaggacaaggtgaggtgcttcttctgctatgggggcctgcagagctggaagcgcggggacgacccctggacggagcatgccaagtggttccccaggtaccggctgcccctgcggggccccgggtctgatcatgggtagggggtgggcccccaacggctctgtcgacccaacaccaggcctgctttgcctccctggccccacagggcactggggaggcccttctgtgggaggtgcttctggccggcaggtacccacttttcctgtgagggccccttttcggaagggctgctgggggcagaaatgcctctcccatgggactaccctgaagccccatggaggcgtctccacagcagccctcctcgcccatgcccacgggcactgcagggtggcgggaggagggggcccaaccctgacccccggggatccaagggcttgaagcagacagtgggggccctgaaccccaacctacatctctggggcatctgcagctgtcagttcctgctccggtcaaaaggaagagactttgtccacagtgtgcaggagactcactcccagctgctgggctcctgggtgagcgccacctctcctcggggctccgggtggcagtggggtcctgcccctcctatttccccaaggcctgatggtctctggctccttccaggacccgtgggaagaaccggaagacgcagcccctgtggccccctccggtgagagctgacaccacccctgctgactccttgtgcgcctgcagcctgtgcttggccaaggccactgggtgtccccaccctcccagacagcagggagagtgacgggcacgtgacagggtgtgacgctgctgcctgggttggcttcagggggctgtgccatgtgagggtgggggcggggcggcaggggcctcccccagtgccaggccccattctgcttctctcccagcttaccccttgggcacagcccattgcctgtcgccataccacccccaacagtgcccagcacacagcatctgcagctactgccagatgggcaggatgtgcagagggcattggacaagggacaggctctctggtggcgcctccaggaagcctctggatcctgttatgctgtgggaggggtgggaagaagtgtcgggagcggggatactctgcagcccctccactcccggccagaactggaccccacaggctgcagacctgtatctgggccggcccagctttctccttgggagttaggcctcaagtctatcctaactgtccacagtccctgcctctgggtaccctgagctgcccacacccaggagagaggtccagtctgaaagtgcccaggagccaggtgcaggcccgggaccccctgggtgagggctggggcaggggagggctgagggaccccgaccttccatggcccatagagggtgggggccagggtgtggggacatttcgcaggcctgtcctcctaggaggggtcagtccagccgaggcccagagggcgtggtgggttcttgagcccccaggagccagggatgtggaggcgcagctgcggcggctgcaggaggagaggacgtgcaaggtgtgcctggaccgcgccgtgtccatcgtctttgtgccgtgcggccacctggtctgtgctgagtgtgcccccggcctgcagctgtgccccatctgcagagcccccgtccgcagccgcgtgcgcaccttcctgtcctaggccaggtgagcgccccagcaccacgcgcagccagccctcctgcggagggggccctgagccggctgtgcccggccctcctgaacccatgcaggcccttcccgggtggcagcgtcagcttgtttttacccggctcccaggtcccgctgatagcgcccatcaatcttactacctcccttgacgcttaggttggggcctggtccttcgggcaccgtgccctggcggccaccatagctctgcctgcctgcattaactgacgcctgctggctcctctcagccttgattttcctcagtggtcaaggaaagccggctttggaggcgtttggggaaacagggtgggccaggttgggcttacacaagcgagacactggcctggcttcaacccggggccaaggcatggtgggaacacctgcacgggaagggggtgtgtgaacctgttcttagagaagtgggtgggataccccatactggccgagggacaggtgctgtgaccgcctcggggctccccagagcctctgtagttacccccgggatgtgtctgaagatctggcaggggacaaagtggtcgggcagggaactctgggatctgaggcccctggctaggtgggccccgtcggttgccattgactcacccacccctcctctccctctaggtgccatggccggccaggtgggctgcagagtgggctccctgcccctctctgcctgttctggactgtgttctgggcctgctgaggatggcagagctggtgtccatccagcactgaccagccctgattccccgaccaccgcccagggtggagaaggaggcccttgcttggcgtgggggatggcttaactgtacctgtttggatgcttctgaatagaaataaagtgggttttccctggaggtacccagcagcctgttccagaccacgagctgcctccccacccacccaacccgacacaggtcaccacctctccaggctggcagggcagcacctgcccaggtccagctggctccaggctgctccccaaacttcccccactcccgcagacaccccccttccaggcccctcacctccttcccctcgcgcttatcctccagtattttaaggactgttggaacgggcaggccgcaggccccacctgagattgtacccctgactgtcccccaagctcggcatcttccacagagtgggtgagggccatgttcctgtttatttaccaacttgatgatacctgggggagcctttgggactgtttgcccaagagccccctttacaagagtactgcctgctcgtcaccaccatgtgccctgccctatgccttggggcctggctctgctgttcctggtcaagcccagcccccaccctagggctccatcagcctcagctcctgggtggggtgggggttcttctggcacgagtttggggttaggaaccctccatgttcaacaggggccctcaccgcttgaggggtctcgggcctcacattgacttcctggggaggctgcatcccagcagcagtgcttgcagcccgagggtccagcagccccaggtgggcacctgagggaggggctcctcgacgagacgacagcctgggggcagagctgtgacccccatgttgccagaggaggtgggcatgtggggttttgccttttcttttgtatgttttcttttcttttttttttttaagagaaaggaaattacaaactctcttgacgctgcagccagccgtggcactgccctgccgccctggctggtgtccagtacttagaacccagggcaggtgctgccggccgcctggggggtgctgggtgggggcgcgtcccaaggcctgggagctcctgtcattgtcactggtcggtcgctgaggctggaggccacaggagcaggatcagctgtttcctcacttacgcaggcctgtggggacaaggtcagagagcacctgggggaacagggctggggcagccactgggggctgccaccccctccccttggagaacctgaaatggaacaaagtccaagcagtggacggcttcaggcctttggcagaaaggagatgggtgggactgaggctctggaaagcccccactgcctctctctgtgccggcaggtcagcgtcttgtgcctgtttgctgacatctcagtggggtctggcctgtggggctgggagtggagagggggctcacccaggggtgtgcctgggtccctggctcagggtctgcgtgtgaccccaccccttcccaggtctttattcccctgttctctgacatgggagctgggctcctgctaccttgaacggcccctgccgggacagccctcatttttaggagagaagagccaggggctacccaggggcgtgccatcaggtgtgtctgggggcctgggcagcccaggggcggtgcagccacctattctgagccccaaactaggattgtgtacggggcgggctgtgtggcaaaagctgtttcagaggaggccaggtgggagccctggcaccccatgccaaagtctggggtttgcagagctgtggacactgcctttcaagaaacaagtctggttctgccagataggaagccagggccccagctcctgccacagagagacccctacagcacccccatgccgcctgctgggaagtggctcttcaggacacccttgcggcccccgactcagagccgactcctggacccaaccccctcccacagtctccatctctgctgggctctgagcttctgggctgggactgggtcctaggtctctgcagccccagtaccaccccagagcctggcatgaagcagatgttagaaaagtgagagtggatggatggacggatggatggcagaacggacaggcaggtgcctggtgaggcccccaaggaaggcagcctctcgctgtgagggccagattggccaggctggccgcagagcaggttctgccagccatacttacaagtacacctgcttggacaagagactggatggcttttcattgacatggtagagaggaaatggatcaaatccaccaatgaaatcaactgaaagaaatcaagacccaaataaaacaaaacctacacaatggaaaagatgtcagagtggaaaacaagcccaaccagacaaagaagcccaaggggtccctgggggcacagacagtgcccaaagccctgacatgacagcagagggaacatggcctggggggacggggggggtgggacacccgggtcctcggcctgtgcggggacggcatcgggggacagtgggggtgggacagcccggatcttcagcctgtgcggggacatggcctggggggacggcaggggtaggacagcccgggtcctcggcctatgtggggatggcctcgggggacagtggggtcaggacagcccgggtcctccagcctgtgcaggggctgcaccgtgttccgcccactctcccgccgccctccgtcatgttcagaccgatggcttccttgacactgtgtctgcacagccagcaggcagcaggggcttgcggggcaaagtcgaggcattttgaaccccaggttcaaatggggttcccatcttaaaatgtttgaatggaaccagtcgtttgcctcctcccaggaagctggctgagctctgagtgatggtttaggatcagcagcagagtggctgagggatgctgggcgctggggaccgaggctctgagggcattcctcgcctctggaatcaggcctggtctgagggtagggtgccctttgacacgtggactgctgaccccatggcccctggagtcctggggacagatggttctgaactggattctgaccccagggagagttctgtccataggaaccaggacccctgggcacacccagaccctgcttggcgtctgcccttccccacccggctctatccttctccacagggtcttcctgtgagaccacaccaggacgaggggacccagcgagggcgcctgagtgtggaccactcgtgttgcaaatcacaggaaagctgacgggctggcgagcaaagggaagatgaaaccctgcccagatgggtccaggctgccaccgagggcctgatgtgagcgtcctggccatgggcccggttccgatctgcctggaggctgcagcggcctggacctgggcagtctgagctcagaccttcctcccgtggccactgcggggatcatgagggcaggcccagcccaaagcacaggagtccttggaccggggggcagctgacccctggagcccccaggctaggacctctgctaatctcttccctggtgtgtggcgagtcctcgctcaggcctacggccgtgagcaaggccctgctgggcgtgaggtcccttccaagtggggaggtctctcgccttgccccagacgggacagactcagagctgccacctctgtagccgtctcccgccccactgcctgcagaggccccatactcacagctgtcctcttcctccgtaaacacgctgaccacctggcagccacagacaaagcccagaagctgaaagacaccacaggcaggggcgtgagtgcggccaggcgagcctgtggggtgtcattgaggcgatgtgggccgaagcactggagcgcccctgaccaccaaggccctgcctctcctggacctcaggttcctcctctgtgacttggagtgggagagctgacccgtgggtatcctcagctctcaagctccggacgcacccctgccttccaccccaccccactcaactgggtagggggcaggtgggtgaggataatggatattgggtggggaagatgagcaggtcagcctgagtggctgcagggagcggggtgaggacacagaagcccaggctggatgaaccccaggccagcacagtcccagccctgcgtcccctcgggcctcttgcctttggccccagcccactccagccagcagccaccaggggttcctcctcctctgtggagcaagccatctgggattctggttttgagcccggcaaagtgcaggagagacaggctgaggactcggggtccagcgggcaactccgggcagagttgggggctggctgctgcctttggggcaggggtcaggcagggagaggggagggactgggagtccagggcagagggcaggccgctgcaaagccccacacacctcgcagacacctgcatccagggccactgagggaaaaagggctctggcaaagggggggcagtgctgccgcagccagaaacaccaacagcatgagcgagagggcctggccaggggcactccaggccacagacaccgagggaggcggcagtgggtctgtgactggagggaccccggaacgaggcaggaaaccttcctggttgcacctcaggccaaccactcagcagccgggtgaccccaaaaattcacttcatcttctggtcttggtttcttcctccatagacttggcccaacagccccccgtgaaggccaccgtgcccaggagaggagacaggacacgcaggccaggccccagggctggacatgcttgggctccgtccccccgacccccgaccccatctggtacaggcaagttggtggttgctttcctggaaatccagctcctttctaggggtcagtcaggggccaggagacctctcttaccaccaagcaggcagacctatctccttgatattgagacaagctcaagaagctgtcccaaatggccatttctggttccatgccacggccagggtgggagcagcggtgagggtgggcaacctccacggctcgtccccctcctcaccccaaaggagcccaagacgcccccatcccggagctggccgtggcgccgaacaggcagccgagcttggggagccattggaagatgccccttccagccggtgccctcctgcctggggacctgcaggccacctctgtcccacacccccatgctccccgccctgcacaccaccgcctcctgcccatcctcctggctccagccccaggtccaccccaaagctctcccctctccctgctgcatggaggcctgggatctgcaggccccgcaccccaacccccagagcctggccttgtcagacgactctcttgccaccaccatttccatccccagcacagctgggcagaggccaaccaagccgccagcctctcccagaccctccaaagcaaacagcaggggcgagatcctagcgaggactagctggctggaatttagaaactacatcctatcaaagaaattcccatccctgggagtcaggataaaagccaacaggaggccccatctccccaaccatgcagagtgcccactcctccagcctcggctcccatagcacgccagccccctccgagagactcttcattcattcccctcaagcttcctttttttttttttgagacagagtctcgctctgtcacccaggctggagtgcagtggcgtgatctctgctcactgcaagctctgcctcccgggttcatgccattctcctgcttcagcctcccgaggagctgggactacaggcgcccgccaccacgcccggctaattgttttgtatttttagtagagacagggtttcaccgtgttagccaggatggtctcagtctcctgacctcgtgatccgcctgcctcggcctcccaaagtgctgggattacaggtgtgagccaccgcacccagcctagcttcttttctgttgcctcctcacaaagcctaatctcaggagctttgatgtgcacacttgggaaattggctctttctcctccagtggcaggcacctgggttccacacattttgggggcaattggggccccctctgtgccttgctgactggctttggtgggagaaacaggccccgactggagctggcagggtgcgtctgtggccccttgctatggggcagcaccttcctggcctgatttcctgcaggaccagagcagagcccaggaaggagccccgggagctcacgaggccacccgcaccgtcacgtgtgctcaggccacgggctccttagatttggaattcagctcccaccgccagccgccggccatggagcctcgctcctggaagccccaggtccacctggtgtgttgcgtcgacaccaccgtgcgcaccaggaaaagccagggagcctcgagatcggtcagaagttcctccagcgacggcaccagccgtgctgcagtcacattggccctgcccccggagctcttgaggtgaaacgctgaccgagcaccctccacacacccgcctcagcttttgcctctttctgagcacttcgaggaaggcactgacaccatctgcattttacagaggcgggagctgaggcacacggaggttgttaggctcacagaggcggcacagcggggaagtggccgtgtggccataccaggagcagcatcgtagcccctgttctctaccaacccgtgcagggccggagaggacggcagagtcccgttcccgcacaagcaacagctgctcctcagcgccacccggggccacagaatccctgtccggtcagacctgggtcacgtggcgccagccttgccagatgcatacgccagggttcccgacaaggctgaggggcttcttgccagcccagcctcaggctctgtccacttcctgtgaccggcatgggctcggggcagccgagggaacaggcgggacacgcatggatgggtttgtcaggaagatgcatgcccctcctccttggggccgtcaaagccagaggcggggtgtctcggcctgatccgattccttcccactccccacagcaaacaccacgctcaacttgagaaagcgcctgggttggccccgcctgggggaggtggtttgcagaggaggcactgaggtgccagccacatgggacccacccgtgataccttaacctctccagcaagggtgggggatgaggaaggcagagacacgcctgaggccaggtcagctggccccgcctcagggagatgagcccccagctccatgtcccctcccccatcaacccatccccacccgggggcccccttccccacgctcaccgcgatcaggatctgcaggcaactgtgtagggcctccacatagctgggctccagggcacagccagcacctgacaccagggcctggccatggggggccccgaggcccactgctggcacctcctcatgcagacagcctggccagcgctcacgccaccaggagcgatgccgggagaggctgaaggtcagtagctcgctgtcctaggggagaggtgcaggagcagggccggttagcaccaggaggtgggcggcctcacccactgcagcctgcggggacgccaccacaccgaggcaaggggaggtcctgtcctctcacctcccctgtcctcccactgcaccccgcccccagggctccagccatggtggggaaaggaataccaaggccctcccagccgctcctgcgcctgccctcgacccacacacctcctcctccaggaaggcctccctgcccagaccccagaactcgctctcaggggcaccgggccccttcctcgtgtcgctggccaaagctgccatgtgacgtgtgtctgcctcgggacagtcttcccggctgcagccccaggtgtggttccaggaagcgggggcccgtctgcctggctgggcacctgccccagtgcccacctgtgctacactggccagagcagagagcccctgggggagaccaaaatccatccaccctggctttaggaccaccctctgagctgtaagcaaagtgcctgaaacagcctcggtcagggtgggctcagcaatggcccccaccctgtttcccctgaacagcctcggtcagggtcggctcagcgatggccttttcccaccccctccccccacgtttcccctggttccctgcattgcaggaggcacgaggctttaccagcctggagggttggtcgggctgggacaaaggaccccacgtggccccaggagggtggtgtccattcacctgcagatctctgccagggtttgcccctgctctgaggcccctcttccccagctggagccccctcgcctgccaatacccacagacgcctttctttcaccaatcaaatcactggtctttccccaaacctttactgagttaccaactacagaccagggctgttctgggtgctggggacagagccatgcacagactgagcccctgcctcagacgacagatgaaaagcaaacacagggggtgttaccaggggcccggcccagaccccagggaaggacctcgcgctgcctcccagtctgcactcacctttaagaggccaccgacttccaggtagaagcagatgatgaagacgttccaggtgacccagacggctgcccacagcgtgtactagggagaggagaggatggggcggcagctgaacacagctcccgggcacacctgcttgcatccagcccccgggggaaggggtcccatgatcgcataggaggggcggcctctgctcctgagtctggcggcccccagatgcacagcatggagaaaggggtcccccaagcccaccctgggacacgtctcagagctttcccacgtgggtgccccgggaatgaggcggtgggacagccagctcaagggagccccagcgcaggtcggcgtacggacacagcatccctggctgagctgccgtgacctgtcctcgcctcaccgggctgacattacacgtggacagcacaggcctccactgcagagcaccccagaagccacccccaagagagcaccccaaagagctgccagctgcttttgtaaataaagttttgcggacacagccacacccatttgtgcacacacagcccagctgcttttgcgttgggactgcacgggccacagcacctaaggtatttaccatctgccctttacaggaaaagtcagctgcaaactactggtctggaccgatgatttggttctgcactgaatgaaaatgctgactgagcagagagacatttttctgaacattttttcagcttctccagaggatgcagcaaggacagtatggccaggggtctgctggggtccaggtcccaccctgggcttccgacagtgattctgtgcctgatttcccatctgtaaagcagggatcgtggcagcacccagatccctggctactgaggggatgaattcgtgaaggcgttcagtgcctggggccccccaatatatgcagctgctccttcaagcagcctcggaaaagcccctccgtccgaaccagaattctagatgtccaggcagcaaagaggtctgaacccaggggtctgggttggcatttgtggggtgttcagtggtgtccaggaaaatatgccaggatggtgccatgggagccgccatcctggtcacctcaacccacctgcccataaagagggccgggcccaggactcaccaccatgacatagcgcagccggtactggatggtgccgaagagtcccaggatgacgatgatgatgtggacaaagttggccaggatgggcgcccactggtagcccaggaagtcaaacacctgcctctccagggcggcgacctaggagcagggcgggcgccatgaagggtggacccgagggaggccccaggcccgccagccaggtactgggccaaggtgacaggatctcagcagggacttcctccccacacccgcccaccacacctttgtttgacgaaggacaccagggctgtaactcctgctctgtgaccaccaccgagcaggcactgagcatctactgtgtgcttggctcttccaagaagaatccccaaatgagcctgacaggcccccttgtgtccccgtgtgtcaccgtctgtccccggtgagcgttcctcccttgagtaggccccatcccctctgtccccagtttcctcatctggagaatgggaacaccaggggctgctctaaatcacgaactgtggggccaggtgacagacacacagcccagaaaacgccactcgggggggtcggatggccgggagggacggacgcgggttcacaagagtactggacgccgaggccccagcctgctgcctgcatctcggccttggggacagggctggtgaggctgctctctggcaggcaggcagcctcccctccacttcaggatattacaggactctgttgaactgccctctacacagggccgagagagaaccaatgagggggggagggaaaggtgcctgaggaatataaagttggtattttatatttaggagaccaagaaaacctgagcaaagccatgaccaggacgctaactgcagggactggcgcactcggcaccacccgtcaccagctccttcccacgtgctggtgaagcacaacccagagaagagaagatgctgtggaacccaccccatcccccaccccagccgccctatcccccaccccagccactccatcccccatcccccatcccagccaaaagacacctgggcccgggggaccactaccaccaagacgcagagaccagtagtggccctgaatgccaggctgtgctgatatttattggatacaagacaaaagggcagggtaaggagtgtgagtcatctccaatgacaggtaaggtcacgtgggtcacatgtccactggccagggggcccttgcctgcctggcagccgaggcagagagagaggagagagagagagagagacagcttacgccattatttctgcttatcagagactttcagtactttcactaatttgctgctgttatctagaaggcagagccaggtgcacaggatggaacatgaaggcggactaggagcgtgaccactgaagcacagcatcacagggagacggttaggcctccggataactgcgggcgggcctgactgatgtcaggtcctccacaagaggtggaggagtagagtcttctctaaactcccccggggaaagggagactccctttcccagtccgctaagtagcaggtgtttttccgtgacactgaggctaccgctagaccacggtccgcttggcaacgggcgtcttcccagacgctggtgtcaccgctagaccaaggagccctctggtggccctgtctgggcgtgacagaaggctcacacttgtcttctggtcacttctcactatgtcccctcagctcctatctctgtatggcctggtttttcctagattatgattgtagagcaaggattattataatacgggaacaaagagtaattgctacaaactaatgatgaatgatattcatatataatcatgtctatgacctatatctagtataactattgttgtattatatattttattatactggaacatctcgtgcccttggtctcttgcctgggcacctgggtggctagccgcccacgaaactcttagtctcaggcctccccatcgtgcccggaggacactaacctacgaggagggatgtctgccctgccggagccccggggggaaggtaagcgagccccccaaggggagcagttcttgccctggcccactttgcctacgccgggcacagttctgtgaggtctgggctggcggctgggacaagctgcacatctcggctaaggggtctcggcctgaggagcagcctcaggtctggctccagaatggagaccctgcagcacagaggggctgggggcgtctttttcatctcgaagccaaggctcccagaggctcagggctccatgacatgtggcgacatgcatgagcagggaggctcatgccaccatggaagcaggtgaccctggtggccctgccaggacccagccccaaaccccttcctgggcctttggctcccagggtctcctcaatgcagcagggcagagcctgggaattggacgcagcacagcccggctcagagccagcaaagttcacactgttctttggggagaaaggcgctcagaagagatgcctgggccctttgtcctgtagcttggtaacacaaaattctcacacttgtcaaaaaaaaaaaggggctatccaacaaccccgcccttcctcccgggccccctacccccatgcagtgactagagctgtggtcaaggactcttcttccccaaggcagaggaggcacagtgggctgccagattgccaacccggccaggacaaaaggcctttgacagctccctgctgcggttcagcagtgacccagaggctggccctgagaggacacggctctgcccagtccctggagagtccccaggtctgctagtgaagccctgcggccctcaagccaggatgactctttccctcttggctgcaaccaaatttccaagggcctgcatgtgcgcccatctgtctactgtccaccgcagaggtgaaacgggaacatgaccccacccgcccctctgcaccctgaggtcacatccgaccagcacagtcgtgcctcaccctgcacctgagactgaagcacccatttctcctgcccaaaccccagcaccatcaaccccagcacatcctcacaccaccttcaacagatggaaaccaatgtcactagtgtcccccaaagcagcctcacttcctgacgctcatgcatcaccagctgccactggccatgctccaaactggggtaccgtccaggctggtgcctgtccttcatgaggtcatccgacgggcactggagtcttcgagtgcccacccttgctctccccattcctgcttccagcccctccccaccagtctcctaagggactcctgccattgaggagccactcactgaaagataccaactgttccaaggcctgggatggtccttgggcccccagcctgttgcaggacctcaggttatctccgcggccccagcgagcctcccaggaaagcgccggaagctccttccttcctgcaggaaggacacgatgcctccgccgtccctaggtccgcccgcaagcctgtgcccctaagccgagcacaggacacccaagctgcacagccacggactccgagggtttcgctgctcaaaactctgaaacagccccttctggcccttctagcttcaagaggaggaggggggcgcgcggtccagctgcgctccgcagcccacaaagcatcgtttcctttttaagacgggagacccagggccaattagcatcgaagcaaagcagcttccccagcctggacaggcgaggcctttgtttagccccctcccccgagggcaccgggctccgggaaagaatccgccccccaggcgtcccagggagcttcggactccggggcagaatggaaacttggccgagggagccccgaccaatcccgacaccgaagacgcccgcgctgcgccccgggcatcggctccagccccttctcgcctccgcgtagctccacgccgggcggaatggggggcggcgggggcgggcggggccggtttgctcgcgggtgggcaggacgttctcaccccccgccccctacactcgcaaactcgcaggcacagcctccgtcatcgccccacccgaatctcagaatcggaacttggccgctcactcggcgcccggggccggctgcgggaaacgctcgcacagacagagacaggcgcgcacccgggggcgcacccggggccacacacgcctccccaggcgatggggtccaggcggccccgcccgaaggcttccgtccggccagcccatccagccgctgccccgcacctgtccccgccgctccggacccgcggccgccccccgcgcacgcacaccggggacgggacccggcgccgcgactccccacgccccgcaggcgacgccaccttcggccgtagcagcccggggtccgaggcatcccccctcggagctggcgcgggacccagcgaacgggccccggggcggagggacgcttcgggaccccacagccgccgtgggtcgggcaccgggggctccaggaggctcgcggaggggtcgccactcaccagctgaaaagcgcagaggacgacgagcgcgcagcggccggagcaggagcccatggtgcccgcctatacaggaggcccccgggtgccccgcgctcggcccccgcccccgctccgcccgctccccacgcgccgcagcctggaccccgccccctccgcatcccgttcccccctcctccccgcaacccccggcccagccccagccccgggtaacagctgcgctgcgtctcccctcccacccccgcctgcggcccctgggggcttcgcgccggccggagagggggaccgttcttaaaggggcgatggcgcggcctctcgggtagcgaggggcggcgccgcggccccaggacagacctgcagctgaggggagcccgccctggacgcggcagggatgaccggcgtccgccccctcctgcaggatgacctgcccagcacctgctcccgccgtgcgccctccggcgtgagatccccatcaaccttccccgtgtggggtctgagcgacccgcatccgcgaggcgttttctctgagagtctcagagattccttggcttggagaagtcctggacccgggtccagagctcagaggtcccctccacgggcgggcgggccgaggactcaggaggagggagtgagccgggctcgcccacctcccacagggagctcctctgctggaaggctgagacctgaaggccaggtctgctccaactgcctggaccggcctcctgcctgcgcgggaggggcctagggagcctcgggttgggacagcctgaggccttgtgcacggtggaggcaggacccagctgcccagggcaggtcctggggtctggatggggctgaaccccgtaaagcctgcgcttccggaagaagcttgcgctggaggcagggaagggtcccagccaggcccgagaggagcaggacgtggatacagtgagccagagtgtcagccggtcggaaagcccatgggggcagaacagcgggagatcagggcaggtggccgggccagggctgccacttggtctttactcagtggcagggcaggctccctgactgccacccaccgcctgaggagcctgagatgggtttcccatggcaacctgaattcctgccccactcgagattttatgaattactgaggattcttgccttcctaattttggttgtgtgtcccacagtcccggggatcaggaggggttaacagaagaccaagggtcaggttttctgcactgcggggagccaccccagatctgtagtccaggctcatgggcgggtgagggggtagcttccaagccccaaaggttagagagcaaaggtgtggccagttgtggagggagggggagcgtcaggttgtttgcagtgctggggagataagaatattcaggaatcagatggtggtgatggttgcacagctctgtgaatatactgcagcccactgagcactacactgtaaaggggtgactattatggtgtgaggattatatcccgatttttaaaagatgtgaaaaaattaatgtttatttatacgatatataagacattgatttttaaatacagcggtaccatccccgtcccccataaccctggttcctccaggcacttggagccattggtggaaggacgtggactcctagaaggtgattcgcaaaggtgccacgtaagcagaggagccgggtaagcagaggcccagtgccacgtaagcagaggaaggcccggagccggctgctgaggtcctgagggagagggaggggcacctgctcagccttgcctgtgtgtgtggatccttctctctcaggggaagctgcctggacatgcgtgcgccttgcagttctgtcctgccaggctgcctgctcttcctcttgaaagcaaaagacttcacttgctgaggatgcaacgatgctctagtgtcccttgcaggagccagtgtcagagccaggagccgtcgtgggcatcccctgctccaaagttacgagttctggtgaaggggtcaggacagcccctttgagagttcagcagagcaggtctgcacaggtcccacgccgtgcacagcccacactccacctgccctggtgcacactgacggcagcagccagccgcggggaccccaggcgcagtgttgcctcgtgaacgttagagcagcctccagaggcgggttcggtctgcacacctggttcgcgggtgacacagttgtgacttggcccaggtcagttgttggggcctggccagctgtgggtggtgaggttttctcggacgcttcatctgctctcgttcttgttcgaattccttctgcctaagaatgacagctttaaaagtgaaatggcagcacgtctccatcattacacagaatcccatgtgggaagaccctagtcggaggcccccacccttgcccggaactggactttggggcagcagcaaactgcagtgagtgtgagtcacacctgaggacaggtgggctgtcttcaggctcccaacaggtctgtcgcttaaggggctggggaatgggggctggaatgccacggcctgcccacctgggggactctgggcagagctggagcagccaggcaggaaaatatcccccagtttccagagagtaaaagctgatggtcctgctgaggtgtgaaggacagtgacggacagtgatggaaggtgatggacagaggaggacagtgatggacagaggagggcagtgatggacagtgacgggcagtgatagacagcaacagagagtggaggacagtgatgaacagcaacagacagtggagggcagtgatggacagtggaggacagtggaggatagcagagggcagtgatggacagtaatggacagcaaaggacagtgagggacagcagaggacagtgatggacagcggaggacagtgatgggcagcggaggacagtgatggacagtggaggacagtgatggagagcagaggacagtgatggacaatggaggacagtggaggacagtgatggacagtggaggacagtgatggacagcggaggacagtgatggcgagcggaggacagtgatggagagcggaggacagtgatggacagcggaggacagtgatggcgagcggaggacagtgatggacagcggaggacagtgatggacagcggaggacagtgatggacagcggaggacagtgatggagaacggaggacagtgatggacagcggaggacagtgatggacagaggaggacagtgatggagagtggaggacagtgatggacagcggaggacagtgatggacagtggaggacagtgatggagaacggaggacagcgatggacagcggaggacagcgatggacagcggatgacagtggaggacagcggatgacagtggaggacagtggaggacagcgatggacagtggaggacagtgatggacagcggaggacagtgatggacagtaatggacagtgatggacagcggaggacagtgatggacagcggaggacagcgatggacagtggaggacagtgatggacagtggaggacagtgatggacagaggaggacagtgaaagacagagaaggacagcaatggaaggacagccaccccagtcagcacaaacgcaggccgagtggggcccatgcattcctgggaggactggcaagctgggaaaggcctccagggcagggaaactcaggagagtgacagcttgttcaggccaggaccttgtgcatcttctccttttttctttcttagtaaacccagtgtattcatttttagcggctgccataacaaattcccataaactagcggcttgaagccacggaagtttattacgtcacagttgtggaggctagacatctaacatccaggtatgggcagggttgcactgccttcgaagctctggggagggtccttcctgcccctcccagctcctgtggctcccagcgtccttagcctgtgggcgttatcgctctggtctttgcctccacctttgcgtgacctcctcctctcctgtgtgtcacttgctatgatgcttgtgatgccatttagggcccacctatgtaatccagcatgctctcatgtcaagatccctaatcacatctgcaaagaaccttgccccaaactcctggcttcaagcaattctcctgccttggcctcccaacatgctgggtttgcaggtgtgagccactgtgccaggcctagatttgggggccaccattcagtcgctgctctcccacacctgcagcagccccagcccgcccgcagggcagaccttccttgtggcagagacaacaggaaaaggaaaggaagaggaacccaggcctgggttcccggcagagctgtccgcagagcctgtgcggggctgcaaaggcccctctgttgtcacaacacccctgtccccgtttcagatgaaaccgggagaactttcaactgcaacaaacactcctggaaaaggagaggccaatccccatggctccacagagagcacagccagaccccttcatccaggcccacaggcaatgttgtcgactctgttcttcctttgaaaaaaaagggtgctggttggtttccagtttactgcagacacacagagaggcccctctctggctcagagcctggcccgggtctctccagtcccagcttctccctcccgaaaggaacgtcctgcccaacaatgcaacacgtgtgtgcactcccagtgtgggaatcaggctgagctggacttcaggggcagcccaggatgcttgcctcgggtggggcgttttcccagaggtttcttgggagctgcctgggagttgccgcagcttcttcccagctggcttcagcccaggcttcctgggtgagattcttgttccctggcccctcacggtacgcgtggtcctgttccccgcaatcccccacccccttgaactccgttcccacactcaggacccacccagatgccagctccccgcagagcagtgcagccccccacttccagccctgacggcacacaccctgccccccaccaccattttggaattgttcttcgccagaaataccgtttcccaccctgtcttcttattctcggaggcagaggcacttcagcttcctgggccgtctgtcactgagtcaccctggtttccattggcagtgccgcctctccctcactcggatgcttctgtgcagccacacgggctgtgtgtgcaacctcaggggacgcatcaaccacgtcctcgggctggccgtagagacatggcctccgcctgagtgtggccgtcagactctccctggtactataagccctcggctgagggggcagaggggcagctaggatcatggccgcagctcccagaggggagcccccatcctccaggccgtcttaccgagcctgctccccagcctgcgcctttcctgacttccctccaggctcctgttgctggcgaccacagaaccagcctcagggctttcctgtccttcctgtcaggggtcctttcccagtgggagctctgggcgggtgggcctgtcccaggagagtcacgtagcttgtttaaggagaagatccccatggctcttgtgtgcacatgtggggcctctctccccaggggctgctgtgagcctgggaagtcccaggtggtgtctcatgccccagagagtagccccctgtgcacctcgcacacgccctcctgcgggtctgctgactttctcctctgcctcagccaagtctcccacgcggagcaggtgggaactgaatgaaggcctcacaggattctgagtccccggtctgacacccacctggctcagcacctgcctcctcagcttccagttgcacgggtggccgcaggcgtcagggtgtgacggcgagcgtggccagtccggtcagaggtctctgcatcctccacacctctggccaggtgagacccagcctgtgtctctcccagctctactgacggacggcaggaagctgagaccccgagcccgtgtgtcctcggttcttggtgctttgcaatgcccctggccctggctgcagccgccccctggctgggccccgagcctgtctgccctgcaacactcacccttcatgaagagggagcctcagccgagaggagagcaaataagtgtaaggggagagggtgcttcctgagacacgcggtgggcccagggctcctgccttggccattccgtccatctgtgggagggccttggcctctctgcttttggagcagggcgctggggctaggggattgcagccacagccactctactgcactggttgggagctcggatcacctgggtgcagaggaagctttgacggcaagggttggtgtggctcatctcgcccaccccacagccatcgccgccccgcagacacctctggatcccggcctgccgtccctcctcccgagcctacattaggctccatccttccccaggccccatgccaccagcaagaacagcccagccaatgcagactgcacccctcggcctcggccgggaccgagcacactgccctgtgtgctctccctggcccctgaggcaggtggcctgacccctgtcttcagaggggaaagctgagtctcgggaaggccacacagccgaggagtgggggcagaaagaacccagctctgcgtcaggctgtgtcaagccgacatttagtgcctagcagcagccacggcctctgcagggcttcctggagcaggtgtgggctcttccagcacagagcatgggctgcaccagcttcggggtgcaccgcgtacaggttagggctgtggctgtggctgctggctgacaccaggagtaaacgtggacaccagaccagcgcagcctagacccagctgggtggcaggtgctgccagtgcgtctcgagggggcagcagggtcagctgcagatgaggctgccccaggactggctgccagccctcaaagagccccctgggtccccccggcacaactctctgcatgaagcccccagcaggagaagggctcactgccctgagcccgacacagtacgagacggaggcctcactgagtccaggccccgcactggccctcccctggatcctgagtccaggccccaagccagcccctcccctggatctccccagaccctctctgtgggaacccaggggctggagccgctcgactacatcttggtagctctcatttgggacctcatctttaatctcagcaactcagggatcaaagagaaaaggccgaggcaggcgaggccagggtttcttgctcaagcattcggatcattaaacaaacgaaaaaaatcaaagagaaggaaagccaggctgctgcctgtggatctgtctgccctccccggaggccagcgccgcacgcccctccctccctctctctccctctcctctctctggctctcctgatggaggccccacatggggttaggattcccaaatgtcacatgaatccagtgtttggggagcgtctcgctccgtttgtgttgctgtaacaaatgccttggactgggttgtgtttaagaactgggtttttctggaggctggaagtccagcactgaggcaggagcagggtcgctgcttggtgagggctgctctctgcttccagaaagcgcctgattgctgcttcctccagagaggacgaaggccgtggcctcacatggtgcaaggtgggagggtgagagggtgctcccttcccctggatcccattcacaaggtgctcgtcccgttctcccagaggccacaggtctaaatgctgttgcgggggggactcgctttcaacacaaattttggaggagatgtcactcaaaccagagcaggaagtgtgaggaaggactcaggagtgccccccggccgcgtcctggctttggaagcacaggaagcgcctggcagcctcgcgttctccttgccctcattagtttgattttgcttgaggaggacacaccagtgccccctccccagtctctgcccctccctcttcctgccagagcccaggaggccccatcctgcactaagaagcccccacagcagccgtagcagggacgtccttccccaccgtcctcccgtcacctcgagggacttccttccgtccccaccgtcctcccgtcacctcgagggacttccttccgtccccaccgtcctcccttcacctcgagggacttccttccgtccccaccgtcctcccatcacctcgagggacttccttccatccccaccgtcctcccttcacctcaagggacttcctttcgtccccaccgtcctcccatcacctcgtttacttttcaagaacccttggaggaagcgaccatccattctcctattctgcagatgaggagacaggggtggtgacgcgctgagtgacttacaggagacgggggtggggacgcgctgagtgacttacaggagacgggggtggggacgcgctgagtgaccctcaggagacgggggtggtgatgcgctgagtgaccctcaggagacgggggtggggacgcgctgagtgaccctcaggagacgggggtggggacgtgctgagtgaccccacagctcagaagtcgaagggctgagtttcattccaggtcctgggacccccagtccccagggttggggctctggcagcgcctcctcaccccggcgtgggagcgaacagcataggacgcctgaactgcaggtgcagagaggacacctggactgcagtacagagagggcgcacctgcagacaggtgggggccctcagtaggagacacctgtgtgcaggcagtaagctgcacctcgtcactagtcacccacggggccacacacagaccctcctgctcccctgaaaccccctcctgctggcccccagtcagtgcttctcccccagaaggagtgtcagagacaaaacaacacatttagtttcaagatcttagttgtgttttatttgctactctagaatcgggcaacacctctttccataaaacagaacgaacgctctcatgagccgaggggaggtcagaggtcggtttcacagacagaagaggcccgaggaaagtagacagaaaccaaaggcgcgctggtcacttcagagttacttttcctgtaaaggttaaagcagaggattaaagcccactcctgtaatcccagcactttgggacgccaaggcgggcagatcacctgaggtcagtggttcaagaccagcctggccaacatggtgaaacccagtttctaccaaaaatacaaaaattagccgggtgtggtggtgggcacctgtaatcccagctactcgggagacaggcaggagaattgcctgaacccgggcggcggcggttgtagtgagctgagattgaaccactgtgctctagcctgggtgacagagtgagactctatctcaaaagaaaaaaaataaaaaaggtgggcgcggtggctcacacctgtaatgccagcactttgggaggccgagatgggcggatcatgaggtcaggagattgagaccatcctggccaacgtggtgaaaccctgtctctactaaaaatacaaaaattagcgggcgtggtggtgcacacttgtagtcccagttactcaggaggctgaggcaggagaatcgcttgaatccaggaggtggaggttgcagtgagccaagatcacgccactgcactccagcctggggacagaatgagactgtctcaaaaaaaacaaaggttaaagcagaggggacttccttatcatgttggcttcttgctggcttctggtggcctgtttggggattcggctgctatctctccctgatttctgggaagggtgggggcggtcagatacagatcttaggaaccacagcatgggtgactccattttggttttgtctgttgggcctcctgcaggagctccgtccaaaccaatgacctctgcattcagttttctttgacaagagcaggcatcggcccctgcccagcactggtgggtctcgcctgttctgggggatccatgtaagtggatggcgcagcccagaccatgtccagtgtggcgtgagactcatctgtgtcctggtggcagtggtctgcttgtttgtgtggctgcgcagtccttaaagacgtggacacctggccgtccacttgccatgcccctgtgcattttctggttgcttcggctgctggctgtagtggggacggcggctgtgagccttctagactgtgctgctcgggaactccagggccaggcacatgcctagctgtccctgtgtctccagcacacgagaggaggcatgtggcttctccaggctcaaaaaaacaccgagtcttcctgctgccgggtctttgcttcccttgcttcctcactaccccgcagcgcccagggcagggccaacgcctgcactggggcccacaagcctgctctttgtggcgctcactgccgtccgtctgatcatcccttgaagggggacactccgagttgtgcctgcccccctacatactcccagcgcagaacctggaaccagcagacgctcaaaaatgtcaatgttgaatgaatcgacactggccgtgttggatgactaattagcaaagtcatctcaaaacagagatgtgagttggggacccagtgagcattcctcaaagtctctaaagaaacagatctcatttctgagacctggcccagctagagctgcctgatatgaacctgggatttcaagagctcctgtttcatccttaaaatgcacttgaatttcactttgtaatgtacttaaggttgttttaatattgaaacaatgttatttttagtttatttttctagatgaagtctcactctgtcgcccaggctggagtacattggtgcgatctcgatcttggctcactgcaacctccacctccccggttcaagcaactctcctgcctcagcctcctgagtacctgggattatgggtacccaccaccatgcctagctaatttttgtttttttggtagagacagtgtcttatcatgttggccaagctggtctcgaactcctgacctcaggtgatctccctgcctcggcctcccaaagtgctgggattgcaggtgtgagccacggcacccagcctgaaacaacattttaaactgctaatcaggcctacagtttatatgcctctgcacaagccctgcccccctttcctgggcaggggtggggtggggagatgtctcagtgcccccatagcccagtcctttctctccccccaccctccctgccccgaccctcacactgccccgtcctgcaggagagaggcatcccagtttgggaagctggtaatgcccaccactcggtcaccagtgttggtaccgctctggctgtcggcaactggctgggcctggggacacatgggaacaactccgatcacacaggaagagtttcccggtccctcgggaccatggaagcccagccacacagcaccggtttgaggcaaggctctcaatacctcgccctccgtgcccaacaccttggtcttctgctaggggtcctcacagtctggggaaactgagtccacatgggcctcagggctggagcttggagcccagggcacccagtcagcacattctatcctcctggccggtgattgtttggaagtggacacatgaccccagctaggcccatcagggtggagcgtgagctttcagctgggatgccggtgcaaggctactttctcttgctggaggcgaatcatgaagcttgcagccttagaagctgccagaagcatcctggggtctcaggatgaagacggaactgcaaacatacacagagaatcctggttctcagcaatagtgctgagctgctggatcaagccacacctgaaattgaactttgttctagaattttcatcacacaaatcaatacattccctttgctaagccatttggggttgagatttttgcctctagcaactagaatctggaaagattcctggctaagatacgcatgggagggtccaaagcaggaggaccctgcgggtccagctgtcacagccccaggatctgagctaccagttctgcaatctgagaagctggcctggtctcagcacattcttagctgtgactccttagccgctgtggccacacgtaattcagcacagctgcaagtttcttggagctcaggacagagcggctcagcattttcgaggaacatttgtacttctgggtgacttacacaccctgacattcttcccatttccttctgtcctgggccccagttcttctggacgccacgcacaggcagcagaagtgggggcagacggggctggaaccagccaggtggagtcccaccatgcagcaggccagaagccaggaccaaggcagcaccgtcgtgggcagccccgggccaaccccacgcgcttctctccaggacccaggcggcaccgtcgtgggcagccccgcactaaccccacgcgcttctctccaggacccaggcggcaccgtcgtgggcagccccgggccaaccccacgcgcttctctccaggacccaggcggcaccgtcgtgggcagccccgggccaaccccacgcgcttctctccaggacccaggcggcaccgtcgtgggcagccccgggccaaccccacgcgcttctctccaggacccaggcggcaccgtcgtgggcagccccgggccaaccccacgcgcttctctccaggacccaggcggcaccgtcgtgggcagccccgggccaacctcacgtgcttctctccagatacaggacaaagctgtttcagaaggacctggtggtggaagatgatcaacaggagacaaaaatgggcagagaaaaacacaggcatccacaggacacaccatggccaggccgtgtttgcttggcctcaccaccattaagatgagaaaattaaacagcgatggcgacgcgtgtgcttagagcccggcggagacagcccccttggtaatggcagccagggaggggacgcaaggaacaggcacactcccatcagcgcatctggcacaggggtttggaggacaatttggtggaatctcccagaacttacctggcacttccacctctagaggtctatgttgtggaaatactcgcacaaacagagagaggtcaccgcacaaagatgtccagtgcaacatcgaaggtaaaacaaagtaatgatgattgtgacaggagagtcctgtcttccaatcagaggccagttagagaacgtaagagacctcagtggttaagatgaacaagcctctgctatagaggggacgcaagaaagccaccaatcaaggtgtgagtagcagggaagcccaggccgtgtgcctgtttatgcagaagacaagatctgggcaggtccaccccaaactgctggccgtgctccctctggaggtcctgcccaggaccaaaggggctttcaagcctccaaggggcacccccatggtgccctggggttgtagaatgcctccttcctgaaagccccacctgcgagtcagctcccctgcctcacttcttccccccgtcaccgctcaagctggctgtgactgtggtggcaatgcaggacccagcagttgagctacaggaatttccctggagctgcctctgtgtgagccctggccggacacaccaagagacagggagagggcgaggggatgagccaaccctccagcaactcccagacaacggggcagggcagggccaggggaatgaccagaattctctcaagtggagggtgcagagggcgtgggtgagtgagcaggggctggaggcccccagcagctgcacgagagggcggggcagagacaagaccagaacccaagttcctaggaggcctggaatgatgagtttattcctgggattttattcctaggatgatggtgctgagcgaggtctgggcagaaagaaggaacttctgggcaggagaacttcaggggactctaccatgaagtgtggagcgctgagcagggaacagcctgagcatggagcagcccagcgagtgtggggctttctggctttggctcaaggtgacctgacttgcaggttgatgctggtgatggagagggttggagagagagaggcgacgatccagaaggatttcccctttgctatgctgctggcctctccccttcacccaaactaagaggtgctggcacccatcacagcacatggcagccggaatgccagctgggagggctgctgtcgtaggtcaggttccctggaggctgaagacagggattgctgtgccagtgattctttgggaggtgcttgtcttaatctgctcaggctgctgtaagaaaatccaccagactgtgtggcttgtgagcaacagaaattcatttctcacagttctggaggccggaagtccaagatcaaggcatggggatattctgggctgggcgagggtctgtgcccaagagccggcacctcctctctgtgtcctcacatgggaaaggcgtcgggtctctctggggccccttttatgagggcactcatcccattcatgagggctctgcctttgacccctcatcacctcccaaaggcctcacctcctgaaaccagcacactggcggttaggatttcaacgtgggaatttacaggaacgccgacattcaggcgtgctccctggagaaaggtgggtggaatgcaggatgggaggagctgagctgggaggggctctcagccacatgcatggccatgtgtgctgggctgagccacaggaatgaacgggctaagcctcagttttcaaggtgagctccgagtccgggggagactaagggctctggtgacgctacggccagatgtgcctctcatgggggcctggagccctggacagttgacgagactaaaagtcatttcaagatgcccattggttctgccatgcaggagggtccaggccactccttagacgagacaacagggcttcccaagagctgcacaaattgctggagtgggagggtgctttgaccgcgcaggggccccgaccctctggctatgctggaggcattccagcaaggctggcccggagcctctggggtgggggtggcctggagccccatctgtgtgctgctgccacccactgtgggactttgggcatgtctctccatagccttagcccctgccctgacagttgtgcaaggtgtggatgcagtgggacctgccttgcaaggaagccctaggagggtggctgcccttggggatgccccataactgacccagtatggtgaccctaagctgatgagcctgaaggcatgtacccatacatgcagtacaaatgtacgcatacacacacatgcacatatacacacattgcacatacatgtgtgtacacaccccagcattgggtagctctagctgttcctcaggctctgccacccctgctgggagctggctggaccctgtagaccaggctgactggctgtgaggcccatacagggtcacagaggacctgtgctcaaggccctgcccactttctctgttccttgtgtttagaatgaaacctctgtggttctcacccctgcaactgacgctgtatctccccatcccagggcccacctggtcctggcccagcggacagctggctccacagaccctccccttctattccgaagactgggtgcaaaccttcacaccaccacttaccatctttttcactttgggcaaattattgaattgtactgtgcctcggtttcctcatctgaacaatgggttcacatcggagtgcacggttgcgcggtttaaatatgctcttcctcatcgagcccagggctgaaattctggcaagtgctcagccagtgtaggcctctggcttgaaagggaaattggagaccttgttccacagatggatgacctgagtctggggaaaggcagtgctttgctgcaggtcccacaacttcacaggtgacctggactcctgcctggctcacagcagcttcgttcctgctcacctgcctgtgccccaggcagctctgcacagccatttactaggaagttctcatttcactgtttttgtattattctgtttgattttattcacatcaagaccttcaagagcctcggggaggaaagcacagagacgatcacattactataactgaaaattaatggactgctggcacttccagaagaaaaacaaattacctaaatattttagatgggaaaatagaacgttttcaattggcagctgcaggttccgccctattccccactccattgccagatcccaccactgtgagcgagctttggcccctctgtgagttggcctctgcaagccttgagattgcagagagaggcgaggctgctgtggatgctgtggggcagcaggctaccctgtctttggaagggccatgcctctaatctgagctttaggaactggggcggccttgctctggggggtggagatagccccagacctcccagagtccgggtgggcctggttgatgagacagcactctgacttacttgctttacaatcagaaaactgcaagttcagcttccactgactgtttggttacccaatgccagatgttggccccaactgtgccccttccaagactgccttcccttttcctctcctccttttcagcttctcaaccttcacagtctgcctcttccaggcagcccactgtgactaatccagcacatggctcccactctctgaactgatggtacccacacagtcctgaccacgagatcggtgctgaaatctacactgttccaactgccacttgtgtagatgctgctggtgcctgtgcacgtcaccttggccctttcctttttgtgcacaccagtggtttcttactgcaagaactggcgactccctcctgagggcaaataaatggcactgagacaccattttgtacccacaaggcctgctgccgtcaaaagactgacaataccaagtgttgacagagatgcagagcagctggacctcacacatcactggcggaagcgtgaaatgcttaccatctttttgttgttgtttagagatgcagtctcactttgtcacccaggctggagtgcagtggagtgatctcagctcactgtaacctttgcctccagggttcaagcaattctcctgcttcagtctcccgagtagctgggattacaggcgtgcacccccaagcccagctaatttttgtatttttagtagagacggggtttcgccatgttggcccggctggtcttgaactcctgacctcgggtgatccacctgcctcagccttcctaagtgttgggattacaggcatgagccactgcgcccgaccacttagcatgttttaataacgttccatacacacttacccaggacccagaaatttcacttctaggtaattacctaagaggaagaaaaaatatgcctacaaaaagacctttcaagacagctttattcatactagccaaaacttagacaccaccccagtgtgcaaagtgtgaataaatgaaggaatgtggcgtgttttccatggcacactactcggcagttacggatacgcacaacgtggctgaatctccgagatatcacgtaaagggaaagaagccatcacgaaagtgtattttgcacgactctatttgtgtgatattccagaacagacaaaactaagatatggggatactggaatcagaagagtggctgcctctgatggaaatgttctataattcactatggtagacgttacctgggggtatgcatttgtcaaaactcattgaactggacgctttgcggtgtgtagcttatatctcaaaaatgtttattctccatcatttcgaaagtcacccagatcaaggaggaatacgtggaatgcacagaaaagtacaaagtaaaaacaaaacaaaaagtgacctgcaattaacctcccacaggtgatcgctttttcagctttgtaccttcctagtgcagactcaggtcccaccagggcgcacctgcgctctggggcgtctgcgtggcaggggtggggacccgcagacgctctcaaccccgccgcctcccaccagggcccaaaggctcgggtggtgggagacagaccccagggcgggagcatgggccccaggacgcaaccctccacccccgcgccggtcccccggtcccctgctgcccactgcctgtgaccctcgcctccctgcctgtcgcccgctgccccagtcctcctacccgagtccccctgccggtccccggctgtcctggcccctctgcccccgccccgtagacctcgctcccctgccggtcctccatggcccccggtcctcctacctgcgtcctcctgcccggctgtcccagccccgcagctcccgccccaggcccccacccgccccgcccccgttgtcggcccccggtgaacgcgccgtcccagaagcacctcagcttggttccgcggatgaacggacgcttctcccgcccggcccccaaaagctgccgtcctccgcggccactacgaccagctgcggtccggggcccggggtgggagttggactgcgtggctgcgcgtccccatggcgaccgggcgggtgcgcgcgtcaggggctggggcctgaggcggaagtcccgcccttgccggctcccgtgagaccttgcaaagcgcaacgtagccggaagctggtggcggctggtgggcgaccgggcgcatcctcattgcagtgcggcggccctacctcggccctggcctgaccccggcggccctgcccgcccctccctccaggtaagcgcgcggctcggcggcgcgggctcggcctgaggccccggctgccgcggcgtcgtccccggccttcgcgggcggacctccctgccgcagcctcctccacccggaccccgctccaccctgaggctgctgccccagagcttgggggcgcccaccctgacctcccccagttccctcggcgctgggcggcggggcccttctcgcgcggacgccccgctgcagccgcccctccgccgtgccgccccccgcccctcgtgcccccttccgtacgaagctgccctccacccgcaccccggatctggaatctcccaccggttacgggagtccagagggtccctgcccacgcacgtcgcctcccggggcgcgagcaggaccctgccccgtccgcttcaacacccttttcccgagctccttcggacccaggactcggcctggacacatcccagtcaggtggcctctgaagcccggtggggcttccaccccctaagaagtgagggtcctaagaaggagatatatttttacatcttggtttcaagcgttcagagtttttgcgttatttttcaagataaactatatttgtacttttgaaggttaggaggtatttgctttcgtgttactaactttaacatttcagggaactagggctcttgaatattcaaaatagtcacgtagaggagttcctcttaaatccaagccaagtcctttcctttttacacactctctccctccggtagttctgtgagtatcctgtatgttttacagttagaaattccagccgtctcctcatggttctgacttttgtttgcctgtgtctgttgaccaatacataagccccgagggcagacgtggtgctatggaaagagtacaggaccgagtatggcgaccaggattggtctcgtcctgctttggcggctcacctcctctccgtgggccgtggcttctgcatgtgccgtggttctgcacagggccctcagtggctgctgtgacaagaatgtgtcccgaggcccttgtaagctcagtcccgctccctgccccgccagggcacctctccccacaggttttccctattccatcctcagtcggctgtataggtggatgctcagtttgatgacggtatccgcctgaatgagtcatgctgggggtccaagtcctgcggtcaggagtgagcattcagatgtctgcctcatgatctgtggttcctggacactcttacagaaggcacagaattatggagcagaagggagcccagggtgaacttttggttttgttttgatgaactgcagaaaacaggtgtttatttcctaactttgaataggtttaaggtgggcactggtcaatactaggagtcatgggcttcagaatttagaaactttggccgtgtggagttgggacccccccccccccccccgcccagtgaatatcttatttctggatacttaagattagaaatgaaatataagacagaggtttttgttttttgttttttaaaagctctgcctacactgtgaataggaaagctggtctacacagtcctcttaaacacagtgaaggagggaagggctggcactgggaaggtcagcagtacacacgtgtgtagcttcccatggcttacagagttcagcgtgttctctgtgtagtgagaggtagagggaacagcacacggctccattcatattgagaggtggatgagcctcagacaacgcactgaggcatgggctggcagggatccaggtctgctgcctccaggctggactatcttctacagtttgctcggtggcgtggtgtgcagggccactgggtcattcccccttgacgctggggttggtaccaccccttcctccggctttgaatcttaactatatcaattttcctggtcctgaattagatgggccaccagttgaagttgtactttgctgaagctaggagagctgcagagacatccataggttttctcttcaccctaaaccttgttgctgctgtcccagtagggtccccgtgagtcactgtggtgggggctgatggtctgaagccactctccttgtcctgcagcagccacactgtcgcccccatgcctcagaatggccccagaaggacctactgcaggtcccccagcaggctggactttccacacactccaggcagcggggcacaggcgggagcctccctgcactgcgttgggaaggtggtggggagggtggagcgcagagtccctgggctccctgtcgttggcagtgatcagcccaagtgtggtgtgtcgccttttaggtggaaaatcgaattttgcagccaatctgtgtgtatttttaaagactaccccttgctgtggatttcaccattagaagacaggactttttataactggtgcagtcttggtgatgaataagcttaagcaaagcggcagcagtaatgatatggtcttcctgatcatcgccctggccgcagcctgggagcctcctgggggtatggggaacagatccttcagtaagtggtccctgcggacccctgctgcgagtggtcctgtgaccggggcttccaagcagctcaacagattgcccctcaggttttctgttgtgtggtgtttttggacagacgttattttcttttttgtagagtagcctgtttgtaagtttaaagtgtttatttttctcctttgcagcatcatggccagcccaagaaccaggaaggttcttaaagaagtcagggtgcaggatgagaacaacgtaagcctctgccccccaccccccgccctaaggcttggtcagggtcagtgagttccgggaagttgtactctgagcctgtagttctgggaccctcctgcagtggatggtggttggcgtggctctggacgtgcatggcttgtgctggctggtggcctgggtggccggctcttagagtggtgccatttctggcgctcatcagtgctggctgtcgggggtgggggcgcctccacatttctcaggtcactcgctctaaggacaggtccgcctcgtcttcccatctgaacattttattacacggaggctctttcccctcacgccttgccctgacccacacccccggccaccctgggcagccctctgcattcgctccttgaggccacctgtcgggtctttggggtccctgggctctgccctgagccacctggtgagtcacttgtggcccctttgcaggtttgttttgagtgtggcgcgttcaatcctcagtgggtcagtgtgacctacggcatctggatctgcctggagtgctcggggagacaccgcgggcttggggttcacctcaggtcagtgtcctgccgctctggctctgcggagagcctgcggccaccccagcatctgttcctgacaccagaggtgctgacgccagggaagcttgggggccacctcccattgcattgccagtgtccactctagtgacgccatggcacagagttccagctgctggccactcagcctccctgcggctgctgcttgctgtgtctaattctcaggacgatgctgggtggagggtgtccctgggtgtccccggtgctggttgatctgctcgatcctctgctttccagctttgtgcgctctgttactatggacaagtggaaggacattgagcttgagaagatgaaagctggtgggaatgctaagttccgagagttcctggagtctcaggaggattacgatccttgctggtccttgcaggagaagtacaacagcagagccgcggccctctttagggataaggtagagatgggcccgattcactcttgcccatggtgtggggctgccctgccgtttgtggcagctggactgtggcctttagtggttctggagtcggttcttctgctggttctgacacacccactgggccacacacaacttgccgccctggagcagaggcttcctgcccagaggggaggcaaatggcttgcggggggagacagaccttccccgcctccaggggagaaagcagctgtgaccgtttattgcctctgtgacatgttgggcacagtgtttctaagaagtctggaggccaaataggtgggtccccctgtgttggaagttggagctgcaccaactaggagctccccagcactgttgttcattgtaaagtgagtcctggcctcgcatccacacctggtctgtgcacctgagcaggggccgtcgagggggccgggaggaggctgcgggtggtgggtgctccaggcgggccgtggggggtgcgctggagtcgacggtgcccgagggcatcgccaggcgcctttatgctctcgaatgccctgtgtctccttgtcaggtggtcgctctggccgaaggcagagagtggtctctggagtcatcacctgcccagaactggaccccacctcagcccaggacgctgccgtccatggtgcaccggtagctgctcctcgtggggccttagtacagtttccactgggtcctgaacttagtagattgggtttcccacagaattctccccttctttgctgttgtgacagctcttttcccagaagtcagtgggaaaaacagctttttaaaattgccaaaacaatacaagcttttagtaaatttagacacccatagagctgtctcagatagcgccccaggtaagctccgcacgccttccaggtgtgcacacagccgtgtctgccgtggcgctgtgggagttcacatctccatctgctcacgggggtgttgtctgcccttccccagagttgcccatctgcctgtggcactggccctggcacccttgaactgaccccgtcatggatgcgtcccacatcccactgcaggaacgtcccgggtggggtgactgggtagcacgaggcctccccacctcatctggagccctgtagtcctgccacatccacgtgcttctgacggaaggctttgcactgcgggcaactccggcttgattccaggccctcggccctcttgcctcacctctccccgctgcctcctgccaacagggagagtgcagagcccactgtggaggcctctcgtgttgcccatgaggctggcattgctggggtttcagcacctgagcccgagcagccactcagagctgaaggccaccctggcctcaggtgctctcaggggtgacgtgaaggcactgcccacgtaggccacatggttctgggggtgcttctggggttacctcagacttcacccagttttggccttaccagccttcgattctcggtttcagagtctctggccagccgcagagtgtgaccgcctcctcggacaaggcttttgaagactggctgaatgatgacctcggctcctatcaagggtaaggacttgagagctggggacgcctggcgtgggccaggcccacagggttcagtctggtgggtagggctgcttcccttggggcctcccatgtgcagtgggtgtgggacccaggcatgcgcggtgcagggtctgattgcagtgagtcccagccagcccagtgtgaattgggggtcttgggtgtattgcagtgagccccagccagcccaggtgtgaattggggggtcttagatgtattgcagtgacccccagctgcccaggtgtgaattgggggtcttgggtgtattgcagtgacccccagctgcccaggtgtgaattgggggtcttgggtgtagagaagcgctaacacttagaagaaaagcataacacattttctgcgtggaatctgctggacctataaatgaatttttatccccaaagctgtcatattaagttgttttgatccttcttctagtacttctgtggctggctttggggacttgctggggaccctgtggtgatgtggcaggagggtctttttaaatgatcagaaagcacatctctctgctgccacaggaggcagcgtgcatgtcctgtgcgtggggacgttggcacgtcccccagagccccagccttgcctgtgttcagggccccacgccctcgggaggagcagggttcatgccagcatcttcggcctcttgtccgctttgttttcagggcccaggggaatcgctacgtggggtttgggaacacgccaccgcctcagaagaaagaagatgacttcctcaacaacgccatgtcctccctgtactcggtgaggacttggccctgcagagcatctcccatgggcagaccccgccctgagggcacgacgggccatagtgggcagtgtggcagtcctggaacatgtgctctttgccttgttctgatctaaggacccctcccttaccttcagcgacgttttctttcaaaaatgtggcttaaatttttcagatcccaaatgtattcaatcacttcctttttttttttttttttaagacggagtcttgctttgtcgcccaggctgcagactggagggcagtggtgcgacctcagctcactgcaacctctgcctcccaggttcaggtgattctcctgcctcagcctcctgagtagctgggattataggcacctactatcacgtcaggctaatttttgtatttttagtagagatgggttttcaccaggttggccaggttggtttcgaactcctgacttcaggtgatctgtccgcctcggcctcccaaagtgctgggattacaggagtgagccaccgtgcccggccatcacttacttctaacacaaaatgtgtgtatttcaaatctaacaacagccattcttccaaggaacccaaggactctgatggcagccacttggccaggttctctgcagaggggagtgctacatgcattgggaagctggctctgtgcttgggtctctggcagcgctgggaagttgctcgggtgctgcctgaggtcactcagggccatttctggtctggggatgcctggaagctccaggtcagatgttcagagtatgacaccctgggcttgttgccattttgctattaacgggaatacattttgttccactttctttttccaaggaaatttttaccatctttaaaaaatgatttttgtaggtgtgatggctcacgcctgtaatcccagcactttgggaggccaaggcgggcggatcacctgaggtcaggagttcgagaccagcctggccaatgtggcgaaaccccgtctctactaaaaaaatataaaaattagccaggcggggtggcatgtgccttgtagccccagctactgaggaagctgaggcaggagaattgcttgaacccgggaggcggaggttgcagagagccgagacagcaccattgcactccgacctgggcgacagagtccgactccatctcagaaaaaaaaaaagatttttattcattgcagcattgttgtccgtgacaccagcaacctgagcctttggccacgggggctgcttaaacgggagcttgcgctgagagccaaggaagggcttattttgttttttgtttttttgtttttgtttcttttggagacgggtcttgctctgttgccagggctggagtacagtggcataatcatagctcactgtggcctggaaccctgggctcaaccatcctcccacctgggcctctcaagttgcttagcctcccagagttctggtattacaggcatgagccaccatgcctggccagaaagggctttttaataactagcatgacaagatcttcaaagtctgttaactggaaataagcaggtttaaagcggatgtcttcatctgcaagagcccccaagtgtgtggagcttccagtcgctcggggtggcctggttgcacctctggccgctgacggccatggttgctagctcttgcagtcattgctacatctttagggaagaaaagcgcatttttccagcctgtgtgtgggcttcatttttgtggcccttccttctgctgccttttgctgggaagctgctctctggggaaggcagctcagcttggtgatctctcaagtgagggtccctttgcacttcctttaggaggaagagggtgagttgtgattgaaatgagacgtttatttttttaaatagctttaattatcttgagaggctcagaaggaaaccctgagcatagatgaaggagagcaggttacgctggtcgtgaccccacacgcctcacctctgcctgttcctctagggaggcaggagggagcgccggccatggggaggggtcctgccctgcagggtgggcttgcttcttgagggtggtgggagccacgggaggctggtttgcgctgtgttgggagcactgcagttggcgaggtgggggtagagggtgcgtttctgttgtgccctgggtccagttgcactcctccagcagcctggagaagcaggcgcggtggggtcaggatgggacgggggcctggggcagcctctgccttggtcctcttccttgctgagatactctgctcagcgccgggttcctgggtcccagtcctgatgtggctgctctttgtcgcctccctcagggctggagcagcttcaccactggagccagccggtttgcctcggcagccaaggagggcgtaagtcactgcccctgccatgccaccgtccccaccaggccctcgggacactggctgctgctggcctggggttctgggagctgcagaagggatgtgggacacagagggtttctgggtgctgtaaccatgggctgtgccaacgcagtaccagccagggtggtcctgagaccttggaggttctgcaggaacacagcagcccaggctgtcaggagctgctcctgtgtcagaccagctgctggcaaaggggtcccgccctgatgaaagtgagggagatgtgagccccattgattcctagactccaccctatccaagcagggcaggtctccggcaccctgtgccctggagcttcttctggggctcaagtcgtgttttgagagcgatttctctctttcgcctgctcctcagcctgaaatgaggggaggatttggggctttcgtcagggcagacagtgaagcatgaggcagagacccaagagcaggcctgacaccaggatggagcatgggcccccgggggctgggctgtggtgttacaggagaaggggaagcccagagcagggcagcgcggggcagctgggtgcctgcagctgcccgcagaagcagccaaggcacctagggtggggctcttgtgagtggaagtcacggtgcgcacctgtcagatgtccccgtggtcaccctggccccgtgtcttcccccgtcacagcgctcacctgtcacatgcccctgtggtcactctggccccgtgtcttcccccgtcacagcgcgcacctgtcacatgcccctgtggtcactctggccccgtgtcttccctgggagaggaaggcctgggagggccctggaaggggcagcaggccaggtgtccacgctccagctcccacggccccgtgactttgccgagcgtcagcttctggttcccgccagggccgccgttttctcgtctgcacgggagggctgcggcctggggaggcccaggtaccttccagccagagtgtcacgaccgggccttttctcctccccccgagctttaaagtgaccaaggtgcctggactgtgctgggcatggagccgtccccacagcagggtagatggggctggggcggtggcactgtccattgaagatagcgctggtgtggcttccccagcccgtcttctgctccagcaggccccggccctgtcctgaagtctggaggatggggttggccctgctgttccctggccttgcacgctgctcacgtgtgccctcaccccaatagcacaccgagctggcctccctctagggagaggccagcatttgtgctaatccagtctctgctgcagctcttctgggcatctcagagttatagggcccgcccagagccgctggcagcccgggggccattgagagacagtcctggacctgagtctgtgggccctgaggaaggatgcctggcagcccatgttaagtctgtcaagccttgtctttgtttttcattttaggctacaaagtttggatcccaagcgagtcagaaggtaacagaggagaagcttctgcaccctggtgcatctgaaactatcctgagtctgacgtcacgtgcagcacctgaagctgcctggttccctcttctcaggccacatgctcagagctgaggggtcccagcgtagaagggggtgttcctgccatgctgttcccctcctcatgcccgggtggctgcctcatggacccactcagggcctgcagggccaaactcgtttcctgttcactggtagctggtaccggtgtgtggccactgcagccggccaccttgttgggagcaggactgcccggcttggcagatggcccacgctggcggtggccgctcagccagaagggccgctgtggttggtgctgtgcctgcggcacactggacgcgtctgcacttcgaggcaacggagcgtctctttgctctggccagggcttcccccagtcggggcagtgtggcctcaggcctttgcatgttttttattctttaggatgtgggtaggggccccgcggttcccacttggtggtcagggctgtgatctggctgtcctcgggttcagaatcacacccaggaggcagtacccatgtgaggctcaccatgaaagctcaggactgcaggcgtggagctgtgcatggctctaggacgcgcctttgccccctgggcgagggtgtcctttctcacgaggtgcccatccgtcacccccgtggcccatatcaccccttcctctctgagggagtctccccacgtgcccacccccagctgcagggacgcccatctggctttttcgtgggcctcccagggtcctgaggtgcagtcgctcgcgcagtttctgaaggtggtggtcagttccagggcagggagcggctgctccagggttgtgttgctgagagcctgcccggtgctgccttagtgttgcggcaccccatggtgggttcgaaggcgctgctggttactaatgccgcccctcaccttgctctctcctcacctgtcttcttgctgtcgggtaaagttttggggtcacaagcagcagccggagccggtaaagcccgtgtctgctcgtgcatgccgcccgcatctccgccgagaatgtgcttggcttcctctgtccctcctgcgtgctgccactgtcttgtgtcacctcacatgtgcgcacgctcagaccctctccctggcctcggtccgtggctctcctttaagatccaggatctgcatcaggcttggctgtgtgtgcctgtcacccctgcgcagtaccactgcgctccccccgggcaaaaaaatgagacccccatctccaaaacacacagacccccaacgcaggcctgctgccggggaggtgctggagggagggcgggggcactgggcgcagagctgctgagcagggtttcctggccacctgcgctcccttgaacgcagtgcaaaggggaggatctttgctctgtgacgagttcttccctttccggcctttgatccgtgctgctccctgcctttgggggaagaggaggcctcacaccacatccccaggtggccgtgtggcctcgactccactgacccaggatcaggagaggctgagctcctttctcagcagcttcttcctatggccccagcctccgtgccctcttccctccaggggggactcggtgcctgcctggggaggaaggagaggcgttgcaggtcagcatggggtggctgcagccggcgttggcctcaggcacaggctccacagggcctgttcccaccagcccggcccggcagggccgcatggtggcgcgtgagggaggaccctggagggggaccttcctgcaagaattggtgggggccgcggtctccgccttctagaggtggcggcctactgcccttcgggtgttgtgtgcaaagccccgtttcctgctccctgcgcttgtatcctgctgccttccctcctgctggtgaagctcgtgctgccctttgctggcctgtgctgccactgccgacccgtgtcccgtggtggagctgtcgtggggctcacgtgacttcccttcctacaggcgtccgagctgggccacagcctgaacgagaacgtcctcaagcctgcgcaggagaaggtaacgggcagctccgggtggttgtgcctggagcccttcactccaggggacgtgggtgtgtcaggggtgttagggggattgtttgtccagcagctgggactcagcgaggccaagcctcacaccccacctctccagcacaggcgtcctcctcggggcctgggctcctcttggaccccccagctggtcccttcccctggcctagggcctcccttgcagtgcccccagcccagcacccccagcccacctccgttcctctgcctcacccctacagctggccccagagcccagcacccccagcccacctccgttcctctgcctcacccccacagctggccgcggagctgtgcccagaggaggctctggtatgggaatgatgcctgccatcctagggggtcaagagccccgccagctccctgcctccttcggggcctgactgggacaagtggggaagacccacctggggcagcgtgggctgtccttaggtcacgttgctatttgtcagcagtggccggcaggggccacgtttgcagacaccaggcctcacagtgacatggtttcttgatgctggaatccctttggggccactgtagaactttctggggctcagcctgatgggtatccacatgcccctgatatttcggatgccctcacccgggggattcctgcactcctgaagctttaagctttcatctctcccgcccccattaatgccgctgtcttcatccgtgcaggtgaaggagggaaagatttttgatgatgtctccagtggggtctctcagttggcgtccaaggtagggagcctgccagatacgcgggcacagtcgaagccagtctccatattccacggccctgggcgtgagagcagggtgtgccccgtgcagccctcagcccagcttggcagtggccgctgtcctctgagacgggaggagagctgcccagcctgacagcccgagggatatggaaacaacttggcccactgcggcccggtcagccactaactgtcacttctccctctgctcttatcttgctgctgctggccttttcctcggtaagtaagtgccagcgccgtctttgctgccatcagtcccactgctctgcgggccatttggggcgtgcattttgtcctgtttcctggcatgaggcgctctgcggacagacggggagggaagagcaggcctcgctcctcccccccaagcatgtggtgggagctcttgaggtctgtgcacgaggctgtcctcgctgccatgtcccgcacacacctggcaccgctgcagagtggccggggcgtctgtgtctgtacgtgtgtgcgaggcaccccttgtttctggattttgcctgggtcttctcagcgggacggcgcgtgccggcttgcgtgtgggggcctcctgaagctgcctgtgccgcgacagggcctgcctaacctctcttcccgtctccttccaggtccagggagtcggtagtaagggatggcgggacgtcaccacctttttttcggggaaagcagagggccccttggacaggtatgctgtgtcccctcctgggccttgcatcccactcccctgccttggccactcctcctacaggctctccaggaggtggctggcatccttgctggggagggaaggggcactgtggaggctctccgggaggtggctggcatccttgctggggagggggcactgtggagcctctccgggaggtggctggcatctttgctggggagggggcactgtggaggctttccgagtgctctgcagctgcagaggcctgtcctgcctgtctctgccctgctgtgtgctctttggaaccctgcaggagctgggctccccaggctagggtgggagggagggtctcacccatatgcccccacgtaggaggagctggcgctgctctgctgttcctctgtctcccagactctgggtggatggagcaggtcgggggccaggggacaggaaggctagggccccagagacctgtcctgggccccatgtccagctctgcccttagtgcttggcaccccagtcgcttctgctggaagctggctgctgttctcggcctctgaccccaacaggggaaccaccggggatctcatcgggcctggccttgtgctgtctactgagaggccagccctggtgggcacagatgcactgcccactaggtgggcccaaattttccctgcagacgccatgtcccttctctccctctgtgtatgtggtttttcagtggtgtgattgcagctgaggacagagggcagggccagatctggggccagcgtagctgagggcgtcgctcgggagggcctgtgtcccggcttgaggccaagcgcccctgcccctccccacttgactaaaccactgttttattgcagcagtttggagctggtagaaaaggaagttttctgtaaaactgtcctccagttggggtggttgataaagagtgggccctggttctccagctccccagcagtttcctctgctctgaagcgggagaaacagatcccacctggtggggctgctgtggaccctgagcgctggcctgggaaggcggtcactgtccaggtgcagagctctcgggggcacagaattcccagtggtggactgagtaacagtcatttagagtcccccttctgtctctttaaaagcccctcggagggccacagttatcagaacagcggtctggaccacttccaaaacagcaacatagaccagagcttctgggagacctttggaagtgctgagcccaccaagacccgcaagtccccgagcagcgacagctggacgtgcgcggacacctccaccgagaggaggagctcggacagctgggaggtgtggggctcggcctccaccaacaggaacagcaacagcgacggcggggagggcggggagggcaccaagaaggcagtgccgccggccgtgcccactgatgatggctgggacaaccagaactggtagggcccactgcgcccccgtccccagcgcccccgggcgacttcgtgtttgcactctgccctcgtcgttcctcctccttccatttgacccaagaatcagcaactgcagtgtgaggacagcgtctcgggaggcaggaccctagggagacccgggtgtgcgccgcctgcgcgtggggagtcttcggtgcgtgggggcggcttgctgtccagcctgtgtgggggccgtcccgtcccacactcccctgggcattcttggactcaaggccggggctctgcgtggcttgctgggaggtgggctgcagcacagaggcctgtgactgcgttccagcggccagttcactacgcagtatctctggggcctgggaccagccacgtgccgagctgtcagcgacgtgaggtgtcccttctcgttgagatatttaactttggttttgctctagttctttctttttgaagagagtgactggagtggtaaagatggaaatgctggaaatgatactggcgctcacgctgccatccgaccaccctcggctcccgagtccacgcctgcctgggcctgtgctgtcagacccgcgtcggtcgtaaccctctgtggctcccctgcatcagcaccgtcccaccaccaagttcaccaggttcaccagacacggcctccacaatagccacacccacacctgagctgttctcagtgctggaacttgaccatcctggaacaccctggaagaaaaaggagcgcagggtgggccctcggccctgatgcaggagggtgcgatagcggacgtggccaggcaggaggggccgggttcaggagctgagcaggggatgcctgtgcgtggtgcctgggtctagggaagctccagccccaggatggggctgccctgcacaccggtgcccgccacatgccaaccctcacctccccgaggactggatgatgtgctgccacgtgtgactcgtctcccttgtctgccctgtgtgaccctcagtcttggccagccatgcatgcgcccgaagctcgtgcagtttgtacgtgaggtgctctcctccctgccaccatgctcatcactctggccttggccatgctccctggtcaccccacttcccggtcgccgtctgcagcactcctggagcagcctgggcccttcagcccctgtgctcgtcccaccctagggactcagccacttgcagaacaggatgggaccgagatttcagcgagccctcctggcgcccggtcctccctgtgggcaccagccctcttggtagctggtgtggagggccggtgtccttggctgccacggagggatttgatcaccgaagcagccacctgctgtagttggacctgaggtcagaggcggggcatcagaggctcaaggtgctgagaagccaccgggaaagcagccagcacaaagggcccaggaagccagcccccgagagctgagcgtgggggtctttgagtgtctttctccaagctgagacgtgggcggccgcgtggtatctcccgagggctgcttggaccctggtgggctgagtgctccgaggaggggtggactccaccttggacagtgggatgtggtgttccacatgtgcctgtttccacgccagcaccttgacttggcagcatggagccaaggtctgtccccgcccaggagggtgccttcctcgggggtagggggacggcccactctgccccagggagtcccttttgatgggaagtgcagtcagcagcgtggaggtgtctgggccaccttcagaaggtggatgtggtggccgagaccccgtccacggagggtgatggcctttcccttctgcaggtgcgggcaggtgggcctgggaccggtgctggggcctctccttgctgtgtgtgagggcccaggtggaaggcgcggacctgacagcattccaataaagcatacgggaacatgcagaatgtctggatgcatcccaaggggccacttccagtgctgtgccagtagggtcatgggacccccgggaaggcaggggtgggacactaggaatcgtgggcgggctccctcactgctcctggccccctccacctagccctcctggggaggccctggcatcaccccatctgagccagagcttctggggagtaggggagcaggcagctgggtgacccagccagggaagagtttacggggtcctggcatgtgcctccggctggccagcgagacactgtggtggggtccagtgacccttggcctggggaggtgggcagtggctcctgtagtagaggatggcaccagggcttgtgtctaggagggctcctgcccctcccagggattcaacaccccctatgctggggacgatcccagcccgtatccaggaaactcaaggtgccacctgatgctggggttggagggcaaggagggtggctgtagccaggagaggcccacagaggtcctggagtctctgtgtctcaactgggtggctcccaagggtcatcctgctctggggcagcgctttagggcaggtgggctgaggtcagaactgccggatggggaagacgaaagtggcgggtcccggccaggctttgtgggcctggggtccgttcttggctgaagcctggtctcggtctctggccagcttggtggggcatgggcagtaacgctgcacagctcccggcctccagcatgcagttccacccccaccgtggctccaggagtccaggctgaccacgctgggcaccttctgccacccgtctcttcccttgagccggcctctgctgtctgtccccagatactggcgtgacccagtggatgctcaaggccagcttctgcccttcccgaaacttttctaagtgcactgggtttcccctggccacccactcatcgcgcctgctggcattgctgtccccctgttgagccttccagggacaagccctgccccatgagccttcattgctggccgacagagggggctgggtgaggctgacggctgtggggcctggccctgctctgttctgacccagccaacacaggcgggggttgggggtcagtccccagagcactgaggcttctcgggggctggaggctgcacaggaggccactggggccatgtccccaattctgggacctgtgggcctgggatcccacctggaaccgggtgatatgtgactggccacaagcatgcggggggttcctgtggggttggggcctcaggccacagtaccctggtgaggagaggacagtggccgacccaggttctgtcctgtccctttgtcgtttgtgaccccggcagctcgccggccctgcctgagccggatcactgccacgtggtctgaggggtgctgcagaggtgtcaggagtccaggagcaggggcggggtgaacaggcagacgggtccgcccttgtggagctcacatttcatgagccaggagtgctgggtgcctgactgcctggtctgtgatgaccctgacgctggcttgcatgtgtgggatgtgggtgcacatacctgttcccaggagcctgtgagccggggctgcacccctgcgcccggtgcctggtgcctggtgcccgtctgccagcctgggcgccctcctctggccatggccaggactgcaggcaccaccggccccctgggagcccgccacggcgacgacctgacaccatctctcaggctgctcctccgggacagccagttggtggatgggctgtgcaagaggtggccatgggtggggtgtggtggctcacacctgtaatcccagcactgtcggaggccgaggcgggtggatcacctgaggtcgggagtttgagaccagcctggccaacatggtgaaaccccatctctactaaaaatacaaaaattagctgggtgtggtggtgggtgcctgtaatctcagctactcatgaggccgaggcaggagaatcgctggaacccgggaggctgaggttgccgtgagccgagattgcggcattgttctctagcccaggtgacaacagcaagactccatctcgagaaaaaggaggtgctcatgaagaggtgtatcctgaatctgaatcggtgtggcccagggatccagggaggtgtggagaggttggcccctctcctccgcagcatccagcctgggcctttgcctccagcaggtgtcacctcttcctctgtggccgctgtgccagcgctggcctctcaccgagcacctccagctcatctcttgcctctggaggctgagcctggggccaggccaagtggtttctcttcagctaccagagcagcaggcagggtcgggagaggctcatcctccctcaggcctcaggcaacccagggtcgggaggcctcgagggggctggccctttcgcactgtcctgagtgcagaggaggcatggacttggggactgggctcacaaggccgacagctgcctccagtggtcctgaagcacccatgcgacgcgtggtattaggctggggtccttaaagacagaggtagggacacgtatttgggtgcactcgggtctatcggggaggcagatgcctcggccggatccaccttgagctgtggacagtgagtgtcttaggaggctgtgcagtgaggccgggatgcccacacttgcgtcaccacccagtcattgggcaagggccgctggggtgcatctgttatctcccaggcagtcccggggcagggacagctgtgagcggtgggccctttatagccagcaggtgctacgggactctgcgctgcctaggtggggccttacgtcacagcacgggtgggacaggggcagggccagggcaggggcagggccagtgttgggctggtccagttgggagcagcccagggtcccgtcgggtcaggggcctgttttccaggcctgggcacctgctgaagctctggttaccggcaccagtctgcaaagtgggttgggtggtggcagccttcaggatgggctgggagggcatactgggggaggggaagggtgaccacatgggtgggggaccaggtgccactgcagcctgctccccacagtgggcagccagaatccctagtgtccagcacccacacgtggcggccttggcatctgagtggctttccctgtgagcccctccttgcaggatggaccctctgggagtgaggagtaaaagtgttgggccgtgcagcccctgcctcctcactggtgggaccctgccctgctgtgcagtggggtccttcgtgctgggatctttgtggtccccgttcttggagagatgcccggggcggcagacaggaagggtggagggcaaagggaggggaggagagagaggcaggccgaggggtgggtcggggggtgggctggggcagtgacttctgtggaggagaagcctttcataagctccagccttcctgtggccacagcaggaccagagtggaccagcacaccccaggagagaggactggggtcccaggagtaggaggaggtgggtgacttccctgtggtcctgaggctgggtggataaggggctgccaggagatccactcagcctgtgatctgagggtgactgactttcagaaaagtctagatagaggccaagtgcccctgtgagccacaggaccggggtgcccagcacgcacagggtgtggccaggaggggccggggcagtgggagcccggggctgcctgagctctcaccaagggctcccttctgggggtctcagacaacatccagggctgtgggggaacgaggagggtgcacatcgagcagagagcggcttgcacttcaggctggatgcctgtggccctggcaggggtcccactgagtcaagccaggtttctggggtgggaggatccagggacttgggggcactcgggctgcccactggtgcctctgtgatcagtttgggagcccagccctcaggtgcctcctgttccaatgcctgggtcttacctgactgcccttggccggccgggcgggcatgaaatccctgatttaagccggtggctttcccgccgggtgaggcctttcccttgcagaggagcagattccctggtggggatactggggtcacacactgggagggggcgtgtattgggggggtctctgttcggctgcagggggtgggagggcctgggtcactcaggaccctagaaccctactgtgtgggaggctggggctcacagaaccagggcctgcactcaagccatgccctcagctcagcacagaggggtaggggcccggcctgccgggagtgctctgtctgctttctgaaggcccgagttggtgcgtggggtgaggggctggcatgagcagtctcggggagcgggagtgcaggggagcggagtgtgaggggagggggagtgcggggggaggggagtgcgggggagggggcgtgcaggggactgggggtgcaggggactgggggtgcaggggaacggagtgcaagtgaacccccggcatttcttcttcagccctgggcgtggtggcaggtggaggactcgggcctggcagctgacatgctccccacctctccgagtggcacctctgggcactggtcactgggttaccctggcctctgagtccccctcagctgctcctcagagcaccccaaatccaacctccactcccagcccctttgagtgggccgggcctggttttttctggtcctccttgtagcccactcagctctccagtggccctggcggcctccctgtctcggcctcagagccgtgtgcccgtggcacacacaccctgcacccccggctggcgtcccccagacccacccgctccccactcctactaggcagctctcactctcctccacaggtctctgatgacccttccgcctccagggcgaggctggggccacagggactccacatgtccagcaatcagacattgcctggagagctcgccccttgcctcagccctccgtggccctcgggagccccacaagcaggaggccccgtgcccgtcccagccacccctgcactgggcgtggggacaactgggggctgggggtcctgttgtcactcagagcagcccccggtggtgtaaatgccaagagtggggtgggagtgggaggcagccccagctctagccttgggtccttgagttttaggcagctgggaggtatcccctagacaacaggttgcaggcctctggtcctcacacatgtgaggggtggagcccggtgtggggacaggctgcctggccctcgaggatttggagaagctctggcgttgtggtcagggagaggacagacggggggacggctgaagggcatggcctcttccctgccacagcccgagcaccatgagctccggagaccctgcacacctcggcctctgcctctggctgtggctgggcgccaccctgggaagagagcaagttcaaggtaaggacactggcagtgggcccctgcttgccccgaggccacgcctgccccaccagtgcccacgcgggacgagccctccgcccctgagccccgtcttcctcctaagttgaatgcgtgctgaattcacagcagctcccacaacaaaggcaagacgggagggagcgtgtgctcccgccaaaccttcagcctcgccttgggagcacatctctgtggtttagttctctgttatattaatgcttggccgagagttattccacgaacacctttcggagcagtctctaggaagcaggaggctggggtaaagatggagccgccttcccttccctcctgcctgcttcccaccgccgcctcccactggtgttttgggcacatagccctctggcttctctcggtgcggcactcgcatttccacgcagcaccaccccctccgtgcgcatccctgggcgacagcaccacgtcctcagaaggcccctccagtctggctgctactggttggggcgtttgggtaacgtagggcaccgcccatggcagcaaagggaaatggcagaggatgctgtgggctcacctgtctgagcagcttcttcctcctgttgagaaatgtgggtttagattgactctaggaaggtgaatttccgtgtctatggagaaggctccggggcctcggccacgctgtaaacttgtccctgggctgggccaacgcggcgcctcccggcacctgcaagctcctgggaggttccgggctcccactgagcgatggttttgttccgctggggtgaaaggcagctcccccttctactgtgcgtttaaagcacccccaccagggcctgacaggccggggcgagggagcctccaggtgccgctgccattgcagaagggcgggtgagatgcgggagccccggtgtagcgtggagccgcctgttgagacccttccgggtttcacggcttgtcttgccatgctgatgtgccaggtttgccctgcacacaggcaacagaccattgcatgagcaggtgccttggtcccctcagctcagacagggtaaccctgccctggggccagtgggggctgagatttcagtttgaaagaagcttgcactgtcaatttgagccaaatcagtaagttgcttctacagaaacaacttgagtttaggcgaaggcaaatctagttctatctagttcaggattcagcatgatggggccacccctcacaagggcctttcgggggccattgagtccctgaggacagccaggtgggctgggggcactgagtccagcccaggacgggtgggagcccacacgctggggcagcccttcccaggatggcccaggctgggtgcggccacagtccagggaggggagcgtggtcctgggtggggcccttcccaccagccgctgtctgcccagtgccctgctcaggccccaacagtgctgtcctccagcagggagctggggaaggggtccctgacgttctcaggcagagtggagcaacagaaggctcttcacaagcaggggctgcgggaggggccctgctcacagctggccttcagagccccctcctcatcccccacacattcctgcctttcagccccatccggagacccggcccagctgctgcctgctctgaatgggtcattgtgtctgccccagtgccccccagcccctgctcttccccccgagccccagctttccggggggcagcccaaagaagcccatctctgtccccattttccaaaaatagctgcccctactgcagagccccggaagctttcagggggcaccaaccctctccagagccctgggaggttggccaggcccctgccgccccctcttcctctcagatggcctggacacccatcccccatcgcgggaggcagcctcgtcttggcatggacgcacacatgtaccaacgtgcacacacgtgccaatgtgcacacacttccagtgtgggattctgcacccacactccccactgaggcggcacgtgcacctggcagtgaccttggcagctaggggtctgcagctgcatggccacttgtcctggggacccagcccaggggactcagcccaggggccccagcccaggggacttagctcaggggacccagcctggggactcagcccaggggccccagctcaggggacttagctcaggggacccagcccaggggacccagctcaggggactcagctcaggggacccagcccaggggactcagcccaggggccccagcccaggggacttagctcaggggacccagcccggggactcagcccaggggccccagctcaggggactcagctcagggccctgggcaggttgccagctgctgtgttggctcggggcctccgatcatcagtggggtggttgctgtcctcccagacatgggcctgagcctcttcctggtgggaggacccccggagagccaggctggggcctccctgggtgggactggactccctctcaccaaagctaccagggtggccctgtgactgcggaccccggggagggccgggttctcctcagcgcccaggcgaggcctcgtatccccaagtggggctgagtccgcctcagacaccctgggtgggcttctgtctcttcggggtcccccgggataggactgtgttcctcccaaatgctgagggcaggatgcctgtacccccacagctgattaggtggatggggaggccaggtcagtcctgaccactatgtcctgtttctgtagcaagcggtctcctgaggctggctgtgctgcctgaggaccggctgcagatgaagtggagagagtcggaggggagcggcctcggctacctggtgcaggtgaagcccatggcaggtgaggacctgcccctcccaggcccccttccccattagcacgtgccgaggacagtcagtgtggtggccgcagccaccactcaggcccacagcatccctcccaccagccccttagtgtcagcacctctctggccttggtctctgctgacccacattcctttcccccgtcacatatgacatggaagagggaatggggctcctctgtccctggcacgcagcccctgcagaaggcattcagtacatacttttaatttttttgatttttaatttcaatttttaattttttttaaaggcagggtcttgctgtgttgcccagactggagtgcagtggtgcgatcacagctccccgcagcctcaatctcccgagctcaggagatcctcccacctcagcctcctgtgtagctgggagtacaggtgcgtgccaccactcctggctaatttttgtattttttgtggagaagaggtttcaccatgttgcccaggctggtcttgaactgggctcaggagatccgcccccctcagcctctcacagtgctgggattacaggcgtgaaccaccatgcccggtccatattttttaaagaaacgactccctcctcagaacgagtctcaatgcgtcaggggcattcagaacagcctggactccgcacagcgaaccccagaagcacctgctccccacgcgttaatccttgtttccaggagcagggccttgaggacaccttttcagggaaccctgttcctagagcaggaacagtcctaacctgacaatgggtgctaattttaaagcttttcaaaactcagatggaaaagcacacaggcataaatgctaactgtatgaatcagcactgtggggtggccaactcaaacccctcctggggtggaaaacgaccgtcccgggtgccccggtgcccttgccaacgtccaccctcccctgctccctggacggccgcctccaacagcatggactagtttgcctgtttcagaacattctctaagtggaatcacaccatggcgactccctcatgtctgtgtctttggtgggcattttgtgaggtttgccccgtggtgtgtaacagccgtccattttctttgctgtatagtattcccctgtgtgatctcttctgctattgatggacatgtggcttgtgtccaggttggctgttgtgtagacgccgtgtgagggatcccgcgtgtgtttctggtgtccgtgcgcctgttctgggtgtaaacccaggagtggaagtgccacagtgtgtgcatagtttcaacgttagtagaaaatgttgaactattttccaaaggggtcgtgccagtgtatactcccgtcaacactgtatgattgcttccgttgcatgacacccttggcaaccaacgcttggcagcctgactggagctactctggtgggtgttcagtggtatcctgtgtttctttgtggagctgtaatttacgtgcagaaatcttcacccttttgagaagaggtctgtgatttgtatttatcacatgaattcaatcctgtagccgctatcacaattgatgtagagaacagttctgttaccccaaggtcagcccttagcccagtgcccgtaaccactgagctgttttctgttttgccttttccagatagatggaccttatcaggttcagtcctgtgctgttcctacgtaaggctgagtttttgtcaagagaatgcattattttttccaaactttttcttcagtgaggtggttattttctcctttatttgattaatgtagtaaactacagtgattgattttttaaatattaaacataatatatacatatatacatatatatgtatatatacgtgtgtgtgtatacatatatacgttgtgtgtatatatatatgtacgtgtgtgtgtgtgtgtatatatatatgtataccttaagagacagggtctcactctgtcacccgggctggagtgcacagtgcagtggcacagtcatagctcactgcagcctccatctcctggcctcaagcagtcttctcaccttgacctcccaaagcactgggattacaggggtgagccactgtacctggcctatccccttttatatgttattaaatcaatttgcaaatatttcatttaagatttttatacttatattcatgagggaatattggccaataactaccctttcttataaagtccttttaaagtttggtatcagctttatacctcataagatgaggtggggaaggattcctcttattctgttttctggaagagtttgtgtaatgttggtggtatttttttccttaaatgtttgctagaattcactggtactgacttctgggcttgtggtgtgtgtgtatgtgtgtaaatacttcacataattgattcaatttccttaacagacataggactactcagattttctaatttttttggtcagttttggtaagttagttttttaaacaggaatttgtattttatataaatttcctgattagttggcataatgtttttcatattaccccatagactctatagttatagcacccttttcattcccgttattgattgaatcttctctctgctttcaaaaggcagtctggaagtttatttactttattagtcttttaataaaacacattttggcttggttggtctgtcgttgattttgtttattttttattgttgtttctatttcttttactctgtgtttaattttctgctctaacttaagatggatgcttaagttcattgattttctgcccttttacaagatataaagttaaaactattgaattttcttctaagcagtagctatagctgcattttgatatgtagaattttcattatcattcaggtaaaaatatctaatttttgttacgatatttttatttgacccataggctacttagaagtgtgtttctcagttttaaaacatgggggattttctacttattttttgttttggatttcttccttcattgcattgtggccagaaatgtacaatatgctttcagtcctttggaaagtaccttgctggccgggcgtggtggctcacgcctataatcccagctctttgggaggccaaggtgggcagatcacttgaggacaggagtttgagaccaccctgtccaacatggcaaaaccccgtctctactaaacatacaaaaattagctgggcgtggtggcacacacctgtaatcccagctactcgggaggctgaggcaggagaatcgcttgaacctgggaggtggaggttgcagtgagccgagatggcaccactgcactccagtctgggtgacagagcaagactccgtctcaaaaaaaaagtacctcgctttatggtccagcatatgatcaatttggtcaatgttccatgtgactttgaaaatatatgcaatttgcagttgttgggtagagttttctaatgttctaattaagtcatttaccttatttttcagattttttatatagttactatgtttggggtctacttatgctgttactgaaaaaagtatttcaaatctccattctaattgtagatgtgtctttcttgtggttgtcttactgttctttgctttatgcatgaggctctgttattgggtacatacaaacttagaatgattgtatcttcctggtaggttgaccctttttcattttgaaatgctcttcattatctctctagtgctgtttttttccttacatcttacttgtgatggtactattgcttcaccaggtagtgtttgcattaaatctcctttctccttcttttactgttaatctttctccagcctttcattttagatgtgtcttctaagcagcatataattgggtattgttttcacccagtgtgacagtctttgtctttttattaaaagattttttccatttatatttaatgaaattaatgatacatttgagtttatatctataatcttccctttttattacacttgttataagtttttattctccgctttcttgtctttgtttgaactgatttttcaatggaaaaatttaaacacaggcaaaagaagagaccatagtataatgaaacctcatgttttcatgatgcagctttcagcaattatcagcgtgcggccaatattgttttatgtccctctcctcaacccccctctacattctatattatcttaaagcaaatcccaggcattatataatcctgtctataaatatttcaatatgtttctctaaaagactcaatcataaccccaataccatgagcagctcccaaatttaaaatgtttcagtactatcatggaatatttagttgtgtagagttttctaacttgatgcatgtcttttattaattaattaattattgagatggaatctcactctgtcactcaggctggagtgcagtggcatgatcttggctcactgaagcctcctgcttccaggttcaagcagttctcctgcctcagcctcctgagtagctgggattacaggcacgtgccaccacgcccagctaatttttgtacttttagtagagacggggtttcactgtgttggccaggctggtctcgaactcctgacctcaggtgatccacctgcctcggcctcccaaagtgctgggattccaggcgtgagtcaccgcgcctggtcttgatgcatgtcttttacaattgatttgtctgaattggggtgtgaacagagtctacacactgtgtttggttcctgtgtcttaagcaatttttaatctaaagcagtttccccctctcccttttccttgacatttatttgtagaagaagaaacaagattgttctgtcgaacttcccactttcttctcttgccagtggcatctttggggagccgtttagctcgctccttcgtctctccaccctgtctcccatagactggcagttacatcctggaagtttggtcagactcaagtttgattatatttgttaacaagaattctttatcagtggtgctgtgtaactcctgcgttaccacagctggcggtacataatgtctggtgtgtcttgtgaagttaagattgttcagtaggtatggggtgattattccctgatgccatcaacttggtgattctatattcttttacccttcaagtaaccacactagcgaccacaacatacagccttgatttatcagcatatgatatacataatggttgtctcagctgtccccaggcaacgctaggaccttagaacatcacaataatatttatcccattttcaagcacttgtgtttatttattgatttttgaaatggggtctcactatactgcccaggctggactcaaactcctgggctcaagtgattctgccacctcagcctcccaagtagatgggattacaggcatgcccggcttttaaaattctatatttatattaaatgtcataaaactttttcattattgtcattgcttgttaatcacgtgtttgtgcaggaagccttgggaatatgacagacctgggcttctatcccacttctactgcggagtagctgtgtgattggtcctttgtgcctcagttttcctatctataaaatgggtgtaatggagttgtgaagattatgaggcttgatacctgtgaaatgcttaggatactgccaggcacacagtgaaaactcaataacagttagctgttgatggtaatgacaacacccctgcctcccatttgctcagccaagaacagagggtcctccctggctggtcactccctggcgcggggctgggtagggctgtggggagccactcactgcacagggaggatggtgtcccttttctttccaggtgtgcaggtgtgggttcctccctcccttcctccctccctccctccaggtgtgcaggtgctggctcctccctcccttcctccctccaggtgtgcaggtgtgggttccaccctcctcttctccctgcaggtgtgcaggtgtgggttcctccctcctcttctccctgcaggtgtgcaggtgtgggttcctccctcctcttctccctgcaggtgcgcaggtgtgggttcctccctcccttcctccctccaggtgtgcaggtgtgggttcctccctctcttcctccctcccagtgtgcaggtgtgggctcctccctcctcttctccctccaggtgtgcaggtgtgggttcctccctcctcttctccctccaggtgtgcaggtgtgggttcctccctcccttcctccctccaggtgtgcatgtgtgggttcctccctcccttcctccctccaggtgtgcacgtgtgggttcctccctcccttcctccctccaggtgcgcaggtgtgggttcctccctcccttcctccctccaggtgtgcaggtgtgggttcctccctcctcttctccctgcaggtgcgcaggtgtgggttcctccctcccttcctccctccaggtgtgcaggtgtgggttcctccctcccttcctccctccaggtgtgcaggtgtgggttcctccctcccttcctccctccaggtgtgcaggtgtgggttcctccctcctcttctccctgcaggtgcgcaggtgtgggttcctccctcccttcctccctccaggtgtgcaggtgctggctcctccctcccttcctccctccaggtgtgcacgtgtgggttcctccctcccttcctccctccagctgcgcagatgtgggttcctccctcccttcctccctccaggtgtgcaggtgtgggttcctccctcctcttctccctgcaggtgcgcaggtgtgggttcctccctccctccctccctcgaggtgtgcaagtgtggatttcttgcccttttctcccttgccttagcacttgagacccagagaatcacccagtgctcacagtgcctctccaggtctgactgctgcctcctgagtgctctttcaaggccatttcttcttgctctttcctctgagaatatggcagtgtcccctttggaatcatttgtttgcttttcacacttgaaatccagacctaactttagaatcatggagtcacacagcagaaaatacttgcggctggtcggtccgtgcagcccatagggtaggagcctgtgggagtgggcagggccctggccccggactcttccttcttggacctggcccctcgggtcgtcatcccctccctgggcagccctgtcttcataccttgacagtatctctgagggttgatggcttctcacctcaccatgcggcggattcctctaggggggtttagtaagtgacatcttcttttcaccgccccaagacccccattctctgtcacattattacccaggagcccatgtcccttccatcagaccctctccctttctgtctctctggcttcaaggggagcagctggggtggggaggaggagccaagagggtttcactccccgccgtgacagatgcacacacgtgtgcaccttggcctctaaagctctccccacccctacccaggggactcggaacaggaggtgatactgaccaccaagacccctaaggccacagtggggggcctgagcccctccaagggctacaccttgcagatcttcgagctcactggctctgggcgcttcctgctagctcggagggagtttgtgagtaagtccaccgtctgccagctgggtacccactcctccaggccgggtcccaccctcctctgggctggggtcccaccctcctccaggctgcgttccagccccaggggtgggtatgtgtgaagcagttctgggctgtgctaggggcaggttcaagtcccgactcaccagcaaggctgccttgcccctgacatctttgcatgcctcccaggctcctgggccctcagcacccacagatgcgcccttgaaggggtgtatgtgcagctgccccagtggaccaggccctccactcccaccctgatggctctttgtgtctccctgcagttgaggatctgaagagtagctccctggacaggagcagccagaggcccctcggctctggagccccggagcccaccccctcccacacggggagcccagaccctgagcaggcttctgagccccaagttgccttcacaccaagccaggatccgcgcactcctggtgggtcagagtggagagagagtaagtctccggggagggagtgacctttggtttcccacatttcccaccatgaggccaggaagttcttcctcgtgtctgaccacacggtctctgaccacgaggccaggaagttcttcctcgtgtctgaccacacggtctctgaccacgaggccgggaagttcttcctcgtgtctgaccacacggtctctgaccacgaggccgggaagttcttcctcgtgtctgaccacacggtctctgaccacgaggccgggaagttcttcctcgtgtctgaccacacggtctctgaccacgaggccgggaagttcttcctcgtgtctgaccacacggtctctggctttaacttaaagttgccatgttcccaggttcactcaagccaggccactgggagcaggtggtcccactacctctgacccctttgggaacctccagcctgggtctagggggtggtgagaggggtgggtcatgctcccccaggagtgggatcaggagcagagctggtccgggggccctggagggagggccctgcccagccggccccaggcgtggagaggtagagccacaccaggacagaagagaagccaggtaaggggtgggcacagacgggggcagtgcactgtgtctgcccataaggcccccgtaggcagggctgggcttccccatagaactgggagggcctggctttgtctcctccatcagactggggtcctcagaagcaggattctacctcccccgtcagacttggaactgaaggaagtgttctcctcagacttgggcatatcccctccagagggtcctcgggtccgctgctgtcctcccctcagggtgctgggctctgctgggtcccctggacttgggctcccccaggggagtgtccccacccatgcaggcctcagggcagctgggcctcttcggtcgccccacggggggctccaccgtgatggctgctggcctcgttcaggcatctccccgggggtctggccctggctctggggcccgcctcaccaggcactgctcctgcaaaaccccggggagcgccagaccggggatggcggctttgcctccacagcgccgcgctgcggtgctcacggcggctctgctggggctctttgtggtgcccaccctcccctccttgcctggtttgcacctggtgggcttctgggcctgatgtctgggcgggcagctgcatgcagccgtggagggcagaggtgcccgagcaccaggctgcctcacattagcggtggctcgatgtgcagccgtgccggtgtggggctgtctagtccggtgaggcctgagggccttggagtcctttcccctgaaacctggcccagcctgcctcactcttgtggctggagccccggggtaggtgatctgggggccttggaccagggatgggcctcacctagcacctgacccgctcccaccgccccagccggcccccagttccgctgcctgccccccgtgcctgctgacatggtcttcctggtggacgggtcctggagcattggccacagtcacttccagcaggtcaaggacttcctggccagtgtcatcgcaccctttgaaatcgggccggataaggtccaagtaggtgggtgctggcccggcccgcctcctgccccacccgggtgtggtccccacagctctgccagaggaggctgtgacctgtgggggtccccgtaccagccagggctctcaccttgtggggtgggacgcctgctccacatggggtgttctggggacccctccgtgtggaggccctggctctgcaagcgtcctctccctggggactggctactgtggccaggtgaccccacagaggcacgtgcagctctcaggtgtggccttgtgccaagctccctgggcatctcagcattggaaactcagcccgtggccatgcccctgctccccaggcctgactcagtacagcggggatgctcagactgagtgggacctgaactccctcagcaccaaggaacaggtgctggcagctgtgcgccgcctccgctacaagggggggaacacgttcacaggtacggcccaggcctgcccctccctctgtcctgagggcggacctccttctgccgccctcccagatcccgaaagcttgtgtgtaaatcgagctccaagtggtgtggacctgagccctgttcacacctttatagagggcagagtcacccccttgtttacctttgatgaaaacgagggcctgtgtccagcgcgtggctcctctgttccacattagcagctctggctgggtccacacccggcccagtctgggtgctcaccttgcaggtagggtctggctggggaacttggggcccttcaacaggtagaccctccctgctcccttgggctgctgcggggcctcctgataccccacaagggaaggagaggagcatctctgctgtccggttgctgccagccgagcaccaggaggggatgctggcagctgcctgtcactttattcctgctgctcccaaggccttgccctgacccacgtgctggggcagaacctgcagccggcggctggcctccgtccagaggcagccaaggtggtgattctggtgacggacggcaagtcccaggacgatgtgcacactgctgcccgtgtcctcaaggacctgggcgtgaacgtcttcgctgtgggtgagcaccatgcggctcccccggccctggagtctcaccgccgggtgggtttagggtcgcagcagggagcttgcattgggcacctggtccctgagccccagcttccacatctgcggcacggagctgcacgcagagccaggcaccgcctggcactcagaggcgatggcacaggcgggctgctcctttccaatcgcctggtgtttggtgccctccgtggaaccaccccaaccctccccctgtggcgtgaacttccctggtgagatattcactgagcagctccagctgccccctctggccaccatccctgtgcctggtgactcccgcctgctgtgccctggcaaggagcttcctggcatcctccagggcctgggactcacaggcgaatcaactctgtcctgtggggaggaaaccccagatttcgaggcaggagtcccaggagcacagacccttccttgatgcccccaacccctcgggagcgcctggcccagcatgtgggtggcaggtgggccgagtacagcccataggcctctttactcctgacccagtctccatggagacccccaccgcaggtggccccgtcgggtgaccccagtgcaggccaaccccacctccctcctcacgagcaggtgtgaagaacgccgatgaggctgagctgaggctcctggcgtccccgccgagggacatcaccgtccacagcgtgctggacttcctgcagctcggcgcgctggctggcctgctcagccgtctcatctgccagaggctccagggtgggagcccgcggcagggcccaggtgaggggcagggtcacccgcacaggctgcagcccccccggctgctttgggcaaagggttggggggacgctgtggctcccgtgtggtacctgaggccggctcctgtggctctgagggggtctgcagcacccccttacatctgtccacagaagggctggggagcagctttcctgtccctcctgtgagtggccaccagggggagcgtggacacagctgcccgtgcagtgaccacctgccccccactcccgctactccagcagcagcggctccagccctggacaccctccctgcccccaccagcctggtcctgagccaggtgacctcctccagcatccgcctgtcctggactccagccccccggcaccccctcaagtatctgatcgtttggcgagcctctagaggtggcacccccagggaggtgagggggccggtatacagggctccccgagccggtcctcagccgtagtgagatctgataagccaaagggagggcaggaataaaggcccacaaataactgggtccaggctgagaagggggtgtcgaggggctgacagcccagggactcactggggagctgcgtctgggaggcagcctgggatgagtgcattttagtggccgaggagggcagagcagggggcgttccgagggtgctggggttagggtcagactcagagcgccttctccctttgattgatcgatcgatggataattgtggtgggcctggcactgctctgtcgtaggtacagggagcccaggcctgtgggaagtggggcaccctgcgggccccagctgagctcacactccagctgacggagttcctgtcctgctccccatcccccggcaccccccttcctggctccgtccttgcccactctgttccaggtggtggtggagggacccgccgcctccacggagctgcacaacctggcctcccgcacagagtacctggtctccgtgttccccatctatgagggcggggttggcgaaggcctgcggggcctggtgaccacaggtaggtggggcagaggcagcggccaggttctgggtgggaggccccactcacggctgtcccttggagcctgacaccccagggcagcatagcgagcagctctggatcttaaccacccacagttggcaccatccccagcttgctgtgtgaccaaggccgagtcactgggcccctctgaccctgggtgttctcttctgaacaccagctataccgttggtgtcatcacctcaactgtaatcacagcccattatgctgcttgtccacagtgttcatggagctcccccctgcttggcctccagcacgtggcttagctcgctgggttcttggacccccagggactgccatgagcccgtctgtaatagccttgttgagatgtaatttacacaccatacaacctgcccatttaaagtgtacaactccagtggctttggtatattcagagctgtcacccatggccacagttcatgttagatcattttcatccccccagaggaaccctgcacccctaagcacccgcccccccagccaccccaagccaccttctgtctctggatgtgcctgtcccagacgtttcctgcaggtggaatcacacagtgcagacttttgtgtctgggtgtttcccaaagcccttttcaccccccggaggccacattcctcccatgacctcaaggcagatggccttagacaaaactgtggggtggccttgtgtccccagagctggagccacaaaccttggcccaaggtgaagcctgggaagtgccactttgaatcctgtgcacctgccaggcggtggccgtgcccacccactctggtgtgagggtgccccgtgcgtgggtgtgatctctgtgtgggctccttcctaaagtgtccctgcatggccccccagcacctctgcctccgccccgggcgctgaccctggccgcagtgacgcccagaaccgtccacctcacctggcagccctcggccggggccacccactacctggtgcgatgttctcctgcttcccccaagggtgaagaggaggagcgagaggtgagctgggccggggggtggcgggggaggcagaggagtggggcagagcgagtgggggctggcctgggacgtcatgtctctgcaggtgcaggtcgggcggcccgaggtgctgctggatggcctggaacctggcagggactatgaggtctcggtgcagagcctgcgaggccctgagggcagcgaggcccggggcatccgtgccaggacccgtgagtgctccaaccccggctgcctgcccacaggcgggtgccccatcttgttcctcagccttccatggcatgggagacctcaggccccctcggtcccagccactgcccacccttgcccctgccatggaggccgcgtgctggccttgaggctctgctgtgctttgcagccaccctggcccccccgagacacctgggcttctcagacgtgagccacgacgcggcacgagtgttctgggagggtgccccgaggcctgtgcgcctggtcagggtcacctatgtgtccagcgagggtggacactcggggcaggtgagagcagagccctccgggggcccgagtgtcttgagggaccacagggccctgtctggcaggcatggggtggagccaaccatcagataacacattcaaaaccacagcggccacgaggcacagcgggggcacctggtgtgggggcagatgtgggtgtggggtctggggggaaccaggctggggaggcccaccccagccgtcctgcagttctgttgccctcccatccctcaggacaagcccattttccccgtttctggggggtcgtggggtagtcctggctgcaggtgctgggcctgattctccaccccagcaagggctccaggcaccagctgggcctgccatgtcgccctcccacctgctgcagacagaggctcctgggaacgccacctcggccacgctggggcctctctcttcctccaccacctacactgtccgtgtcacctgcctctaccctgggggtggctcctctacgctgactggccgggtgaccaccagtgagtggggagaggctggggctgggggtccagcagggtttctgtgtccttctgccctgctagacagttcacatcaagtgttttgggagcctgccctgggtcagtgctgagccaggtggggatgggcacccggacgggtgtgatggatgggggtatagggtgctcctgggtgtggctgcccctcctctgaggtgcccaggctcaggggctacacccccagcctgtgtctccacttccttcagagaaagctcccagcccaagccagctgtccatgacggagctgccaggggatgcagtccagctggcgtgggtggccgcagccccgtctggcgtgcttgtctaccagatcacgtggacgcccctgggagaggggaaggctcacgaggtgggcaggggtgggtttgtccttccgaggggccccccgtgggcccctagtcctgaagccaaagtctagggctcagagccatatgtgcgcccaccctgtctcccagggatgcctcactgcccggccccccaacctgaggaccccactgcacccggtgacccctggggctctcctctccctagatctctgtcccagggaacctcggcacggccgtcctgcctggcctagggaggcacacagagtacgacgtcaccatcttggcctactacagggacggggcccgcagtgaccctgtgtccctccgctataccccctgtaggtgcccctccacttcccctctgctgggtgtggggcagggatggcccaggggatccctgactcacccgctgcacaggcccaggaccctagactcccagaactgctggctccagagccctgatcactgggcctggtcgttggagtctgcagcacttccttgagctcacacgggtataggtgttcccccagtggccgagtgcacaaaccacctagtgtcccgcagggcagcccaggcagcagccctggttgggggtatggtgagggccctggcaggtggcgtggtgtgggtgtggtggggtgcggtgtgggcagtggcaggggtgtggtgtggttgtgccaggggggtgatgcgggctgtggtaggggtgtggcatgatgtggtggaggcattacgcagagcagggtaggggctgggcagctggtcctctggccaccgggtgcctcctttctggaggggcctgagccccacacaacccatgctctcggccagccacggtgagcaggagcccaccctccaacctggccctggcctcggagacccccgacagcctgcaggtcagctggacgcccccgcttggccgcgtgctccattactggctcacctacgcccccgcctctggcttgggacccgagaaatccgtgagtcttggtagagcctgaggctgccccacctcgtggggcctcctggaaggggtatggccacactgtctgcgaagggtggcagctctgccatggcgggacgcagagggaggcagctgagccgcgtggacgagcaaagttgcccaggaagtggggaccaggcaccctcccttctcctaggtctctgtgccaggagccaggagccacgtgacactgcccgacctgcaggcagccacgaagtacagggtcctggtctcagctatctatgcagcaggcaggagtgaggctgtgtctgccacgggccagacaggtgagtgggcaccaagaccccagacccaggtagacccagccccagccgggccctagaccccagaccctgccagctccagactcatccaaccccagacccagccaaccccagacctagttgaccccaggggtcacaggcaggcaggggtcctgggtggctggagatgactggttccaggctggccccacctggattctccagggacaaggacgtggtcacacttgcctggggtcttccacggtgggagctgctgttgctggttttttgtctcttgctggttttcctggagaaccacaggtccagggcgagggctctgagaggcatccatcccaaccttccagcttccctctgggcttcccattgtggggtcttccagtcttggcttgcacgcccttggggacggggtcctcactgcctggacagcttccccggcgaggcagccttcccatgggaggggagagctgctcctcccatcaggagtgctccttcctgccttctctgcccatgaagggttccgagcacctgccatggagcaaacccaagtccctgggcccccaggacacgcatgcccccagcctgcccgcacaccaggcatctccctggcccccaggacacgcgtgcccccagcctgcccgcacaccaggcatctccctggaccccaggacacgcgtgcccccagcctgcccgcacaccaggcatctccctggcccccaggacatgcgtgtccccagcctctcctcacaccaggcatctccctggccccaggacacgtgtgtccccagcctgcccgcacaccaggcatctccctggcccccaggacacgtgtgcccccagcctgcccacacaccaggcatctccctggccctgccagttcagggcactcctgggtgaccagtaccctcgaagggtatcacacccagtgagatgcctggtacgacccggggcccactgggctgtcttgggggcagctgcttcactcagtgagatccagaggggcagggaccatccctgttcccttccttttctgggaggcgtggggaccacaggccttgtgggtggcagatgggacatagcacagtcccacctatacagatggagcacaggctggggcatcgtccatgaagtggcccctccccagcggtctgtcaggcgttggaggctgggccgctcccactcacactgaccctgtctcctctcagcagcctgcccagccctccgccctgacggctccctcccaggtgggtcctgcatgccctcccctgcctgcccacccacagtctctcgggctcttcctgggcgtgggggccaagggtgtcgtgacctgggacccagtggtggtgcagttggaggatgtttgggcgggtttgtgcctccacagacgtccctgtggctggctgggcggtggttattcctgcttctcactgagggagccgaaggttatgtaaggtcagggccaggaaccggcagagcccaggcagcgctgggggcgctgggtcctttccagccccattccagggtctctgctgactggagctgggggtttcaagtgctgagcccggggttctcattcgagttgcctgagagtgaggccctccccagagaggggctgagaggtggagatggtgggaaggcagggactgcctacttgaaacaggccttggaaggggctgcggcctctgccgcctcctgcccggtgcctgctggcagcgctgataagctgcagtgtgaatgggatttcgcccttcactttgtaccaattagtgctggaaaggagctggggcttcgagggtggtggctggcacctgcggctctgcgcggtggggctcgccagggaatggggtcatcgcaggcccccaggcagggtggatggagcgagctggccacgctgtgtgccagcaaaggggaactcactgacagagtcttcctcagagggaaaacgaccctgggcgggcgggggacgcggtgcagtgggcttgctggggggcaggggcgagaggtgggagttggggctcatgatcgggggctgggcgtccaccttgtccatctctgggtctccgaagctgggcatttggcccagtgatttaccatggtggcctggggagcggcccctcccagtgtgttggattcccctggggaggggtggggggcgatgcccagcccagggcctgaagcagacccctgcccaccccccagcccctgtgctgacttcccacccacgccgctccgtcacccctccctcccaccgcactgcagcccctgggtccctcttgagtccccgctcctgccccttcctccctcccctgccatctctgagggtccctcggtgccccttcccccaccatcttccccagggtttgacctgatggtggccttcagcctggtggaaaaggcttatgcgtccatccggggcgtggccatggagccctctgccttcggtgggaccccgaccttcacgctcttcaaggacgcccagctgacaagacgggtcaggtgtgagggcaagggctggggtggagctggaagcccaggctggggccgctgaagattaggaggacatggtgggggggcgggcatgggccggagacctcctggaggctgtgggacagggcagcgctgctatgtcagcaaacggctgactcaccccagtactcacacttcagaaattcacattttacaaattaataaaatctccatgggcagagtgaggccagccccttggcatattttggcaaccaagtatggatctatttcccatgtgagctgagggctgatcaaacacgcaggagccccagactgacctgaggcgatgggccaaactgccagtagccggatttagaggaagcgatcactcaaatagctttgcatgagatttgggacaattcctgatatctcatgaccaccctcccttatttacagagaacagttgttcatcgtgaccctgaactgtgatataagctgcatgacagtttaagttaaaatggttgatgataaaggcggaagccaggtgtggtggtgcacacctgcagtcccagctactggggaggctaagtccaggaggttgaaaccagcctggacaatgcagcaagaccccatctctacaaataaacaaacaaacttagctgggtgcggtggcaggcacctgtattcccagctactcgggaggctgaggtgggagcatgtctgtctcaggagacggaggctgcagtgagccaggattgtgccactgtagtccagcctgggcaccagagcaatactccgtcccttaaaaaaaaaaaaaaaaaaaaagaagttacaaaggagagttatattctgtaacagagattttaaaattatagaaatatatatatttaaaagctcacctagcactgttggggcttaggaatgtctctcccagcctgttttgtccccacacagccgccggcccatgtgctatgctcggccctggccccctggtcaccacggtgtcttcgtggctgaactcgatgactgttccccggcttccctcaccatcctctccctccccccagtcttgctgcacatgccccctgtgctccgcccccatggcagtttctcttcagggtggtatagttgccctctgccctcctctctgggcagcaggctgcagagccctcttcctccatggcctcaggtggtgtagacgccccccgcccccctctcctcttcctcggtggcctcaggtgcacgtactgagctgggtgttcttacgggtgggtgaggtgggagctctgatcgcctgcagcccgaggcagcttcaaggcctcctgggtgcctccccaacctctctgctctcaagcaaaccctcctgggaccaggcagcctccacagggtggctgtttccatgagtccctgttctcaaatgagggctcctcccagccttgtggcatgagcaggcacttcccatgcctgtttgcccttccagagctcacagcctgagaagtgggggcagatggttctccaggtgcggccacccagggtggacccccgtgagggttgccacaccaaaagaggagggctcctgctgtgtggggtcgggaggctcctgaggtggcatcacaggtgcccaggccccagaccagtctgctctcgggatggcaggaaggtggctgggcatcctaagagtgaatggaagacagataggaggctacggccattgggaccccaattctatcaggggcccgagaccctgctccctggaccccgattctatcagaggcccgagaccctgcttcctggaacattaggggaccaagaccctggtcccacccctcagggtgtctggctgggcactggccaggacccactgggcggtgccaatgagtgtgagtcgggggagctgctcccgagagcagagctgcctttcagtagtgatcctgagactcccctgtggggtgtcctgggccggcacccctcaccctcacgggccccgggagcacgggtcttggtgagcccttgctggggtcatctgggatgtgacctgggatggccctgggcctggcgcctccaagtacttctgttgaatcctcctcattcaatgggagggattctgtcctttatgtaccccatgttactcatggggaaaccaaggcagggaggccccagtgtggcctcatagaccctcagctctgtggaaccaccagtctgggctcctagggagccagcggcctccacgctcagtctacagctgggaagggtgtgcgggtgcaggggtccaccatgaccctcagagcagcctcagggactggcactggggctggggctgggcgagcggatcgttctgccaggtttggctgcccttgggtctgctcatgtgcctctccctcccccaacccccacagtgacgtctacccagcccccctacctccagagcacaccatcgtcttccttgtgcgcctacttcccgagacaccccgtgaggccttcgcgctgtggcagatgacagccgaggacttccagcccctccttggggttctgctggatggtgacgtgggccccgcgtcgcccccagcagtcaggaggagtaggggcagggaggccccagagccctgggaggccttcagaggaagtccagcctccaggccaggccctcagcaccctctgggtgggaggcaggtgtcccgggcagggggctgtgggccacattgagggtcacctccagcttggcaccctcagggctgctcctgtcctgtcgtgggggccgccctgctcaaggtataggcccggctggttgcagcccgttctcacctgctccaccccttccctggcagccgggaagaagtccctgacctacttccaccgtgaccccagggctgccttgcaggaggccaccttcgacccgcaggaagtgaggaagattttcttcgggagcttccacaaggtcctggtgcagctcgcgcccctctcccccgttcccccagctctggggcagcccagccccacagggacctgccggatgccaactcctctccctaggagagcaggaccttccttgggagggaacattgacctggggctctgttcctctaccccagctcttccatcttaattggagttgaagagcctcccagcccatctctttgggacccacagaccccgggaggctcctgcagcaggtgccatttggtccattttacagaggggaagccgaggcccagcaagggggggttctcccagggtcccccgaaacctgaggtgaggtcaggttcctgaccccaggtcccagggatgggtgttactccccagccctggcctggccttgggggctcaggtgggcaccggccccgcctgggctgtggagaacctcccgtgccgtctcacaggtgcacgtggctgtgggccgctccaaggtcaggctctatgtggactgccggaaggtggctgagcggccccttggggagatgggcagcccacccgctgcgggcttcgtcacgctggggaggctggccaaggccaggggcccccggagcagttcggccgcggtgagttgggccctgcccacctgctgggccacgctggtgggggctggcagcctctctgagccccggggctgagccggctcccctgcgttgcagtttcagctccagatgctgcagatcgtgtgcagtgacacctgggccgatgaggaccggtgctgtgagctccctgcctcggtgtgccccgtcccttgcccctgttccacgaagcaagttagggcaagtgcccactgagggtcacagtgcctggggtcagttggcctgtccagattgtcaccgtgctgggagagatcagggaaggctttcagaggaggcagcctcagggccagtggatgagcccagaggggctggacagagagtcctggaggccctggggcaggctgggaacccctggctgcactcagggccatgcccacctctgtgggcccagccaggtgcagatgagtcaggaaggggcacgtggccaggccagagagcccctctcatcctcagtgactcctctgtataccctgtgctgggcttggccatactgggggcccagacgggagagagggagggagaaggcaccattctgtcctggggctcatgcggacagcgtggcagggtgggaacccagggccggctggacacacaggggctcagtggcctgagtcctggacctgcccactatgcacttgggcccctgaccttcgcccctgcctcccaggtgcgggtctggaagtctccctggagcccaggtgtcattggctaatctcagctctagggtcaggcaagagccagggagagggtctctctaatgggcagggtctctcttcttccagagggatggagagacctgccccgccttcgtgtctgcctgttcctgttcctcagagacccctgggcccccaggacctcaaggacccccagtgagtccagtggcgtctccttggggtgaccagggaacactggccaatgtattgctgccactggtggatgtgtaacccaggccctcccgccccggtccatgcccccgtcctgccgcagagttgggatgtatttcatgagcctcttccctgctgtgcccgccctgggccaggagacagaggcctggcccagccccttccttcccccaggctgggcctcccctgcgaaccctcctctagtgcggaatccagtgattctcactgtcagggttgggaaggggggccaggcgcagctccttccttcccccaggctgggcctcccccacgaaccctcctctggcgtggaatccagtgtttctgaagtgtgaggcttgggacggatccaggcgcaactgggatccagaactgtgctgtggccacagggtgtgacgtgggccggctgtgagtcacagccacttggacggccactgtcctgggtgctggcagcctagctcacctgcagcaggagctatacgggccctctacccaggcctcagggaggcggccctccaggcctggacccctgccatggggtgggtcctgagaggtccttggacctgccatggctgcagctgcctctgctcaccccaaggttccagcgccccacaggtgacggctggggcttccagagctggctctgggaccggtcaagcacactctctctgagctcagtgtccacagccttgtctactcagggggccggggtttgaacccagaactgcctgactatgagagggaaggatgggctagtgcgtccttgccctggaaaccccttctcttccccttgacagcagtggacagtctggggctgggtggggcatggggctcagggtgggccaggcatggggctcaggggctggtctttgctcctctaccttggttgggtagttctgggggcttagccctgtttgtgcctctgcagggcctccctgggaggaatggcaccccaggagagcagggcttcccagggcccagggtaagttttggggagccctgggaggtgaggggcctggatcgtacctaccagaagagaacacccctcccagtgcattcctgagagtgcagggagctgcacgcagcttccctaggcagggtggggtctccccaagctgcagacaggcagggaccccagcaccccaggagtccagggggtttaggctggcctcccccatgtgcctgcagggcgcctggcccaggcctggttatggtgcaagtccccttttcacccagatagggaggatgaaccccatggcccagcaggggaatctgaggcttggggaggtgaggccacctgtcctattggccctgaaggccgcccttgatttccatggggcaggcatgagccagatgccttctgtgtgccgggctgggcccaggagcttaggcccacagagtattttcagatgtctctaggctcagcgcatgcgcggcgtgcagggaggtgtttcgggggcggaggttctggttctgcggagagggatgttgaagacagcgcgcccagcgatggcagcagccccccaccccaggcgccaaagggccgccctccaggctcgattctaaacatttacctaaaccacggtactgcacaagcgtgacacagatgccgaaggcgtggtcggcatgcagcaaggccgccctcctcccgaccccgacacccacctctcccccggcagccttccagcgagttccacatccccgtgagcaaagacgtgcgcctggctctggcggggctgtccttttgcacctgcgctgccatattccctttgtctgcggttgtgctggagcctcagagcacatctcaggcacagagtccctaggacagtcgctgggtggaagggcacacgcccctgtgctttggggtggatgtccccacactggcccggcagagccgtgcgaggcgctcccccgcgacgagccagcggtgacctcccacccccatcttgcattcctggctgctttgggagccgcgtctgatagatgaaaatgcatttctcttccaagcagcgtgaatgccctttgaaagttgccaatattttcttgctggagatgtcctctgacttcttctccaccgttcttttttcttaataatttgtgggcacgctttttacttgctggaaccagccctgtgtctgtgatgtgagttttgactgcgtttggcattttcttgtcttttgaccttgtttgcgacgtgcgtttccatacagattttaaaataacttttacgtagtccatgttactgctctgttctatggcttctgaattttgtatcctgttttaaaagatctttcttattccgagagtagaaatcgcgcctcctcctggttcctcctggtgcttccaggcacttttcgacactcccaggtggattcgtctagagctgattttgttacagcactggggaggacagaggacggggaggactccagcttcacctcttcacagaccacccctggtcgcctgagtcgttcattacacagccagccccttgcagaagttgaacgccctggctctcgtgctgtcctaaggcccctgtgtattttggggtttttcagatgctccagtctgtcccgttgatgtgtctgttgttcacaggcgagggctgtgctgcttaaattattacagatttctttaagatgtcgatgccagatgggctggtcctcttttgtattattcccccagaattttcctggctctctttgcttatttcattgttcagtgaactgtagaatcgacttatccgtttaacctaaacaattcagttggtgtttttactggaactgcattcgctttatagatatactcgggaacagatgatgtcttcatgatgttgaatcttctcatccaaaaacacagccatcctgccttttgttcacagggcctgttgtggccctcagtacagtgtggggatggtctcttcctacagacccactcggttctccttcatccctacgtatgtcctcttttttgttgctattataagtgaggtgttttctctcattacagcttctacctcattattttcacactggccgtgaccgctgtgtatgacttttgtacccagttttctttctcaattatcttctttgtggttttcttggattttccaggtttacagtgacatcacctgcaaataaacacttcaccttcggcttttcagtcttgatcactcaaatttctttttcttgtctaatggtgttggtgaatactccagaattttgtcagagaacagtggcagtagcagatactctcattttcttcttggcctaacagaagtgcttctagcatttgaccattaaagtgctgtcctggaagcggagacaggtgcattttgtcatgtggtagtgaagtccatccactcttcttttattagatttaaaacaccaagaatgcacattaaacaagctctagtgctgttatggacataatgaaatgactgtgcgtcttggagctattaattgtaggatatccctaaatactggatgattgctgcatccgtcgaaaatctgacgtggtcgctgaattctcgttatccatgccatgtgctgcagagctcagcttgctgacattttgttttggatttcgcactgatgcttctaaataagactgtcacagttttctttatagtgtttggaacctcagtttgctttgttcaaaagataatttgagtttaaatagcagcagtgtcctctgccccacagggttggatttcccataaaacctgagtctagtgttttggggtccagggcttaagaaagttttctgtctcttccatacagttggcctgtgggggtctctggcttttcctcggtgatttctgcagcgccccccacaccccgttagaacccagagttgggcaggggagggctgggggtgaggttggttggaactggcttcacaggcttggctctgccattctctagctctgcagacccctgctgtgggttctcccagaccctcccagggtgagcagtgagggtgctggggctgcccctgctcctttaatggaggtgtctccatgtcggtctgggtctgaatgcccagagggctgggagggctggctgtgacccagaggggccacaggaggggtggcaagcgtgaccttgtcaggccctacccgctgcctgtgtctccagggagagcccgggccacccggacagatgggaccagaaggtcctggaggccagcagggctcgccggggacccagggccgtgcagtccaggggcctgtggtaggtgtcactccttccctgccctcctgccctgtgccccctccgcttcgctgtccagcccatcttccccctccagggtccaccaggggtcaaaggagagaagggagaccatgggcttccaggcttgcaggtagtgtggctggggccagggggccacaggggttggtgggggtgggggaaggacagggatggagatggggagtgcctggggggcacaggggttgggggtgaggcctcacaggcagggccacctctggatgtgaccctggcccctgcctggccggcccctctgttctctcccagggccaccccggccaccagggcatccccgggagagttggcctccagggaccaaaggtgccggctctgggcttggagggttctgtcagggtggtagagactggcctggggacggggggccttggagatggaggctgtggggtagggagggggaggtgctttctcctgggctcctgcctcacctgctgcaccacccccttcagcctgtggcctggccagaaggctggagagctccagcccaccccaggcaggagctgtcactgaggcagggtgggtgggggagtggctgggtaggagcctggcagcctcagctgcctcacctttgctgcttgggttacagggtgtgttgggtgctgctggggggctgtcaccatgggagggctgggtacaggtacaaaccccacccagcttgcgccttcctttgccatcagggaatgagaggcctggagggaactgctggcctgcctggaccccctggccccagggtaggcaccgacctcccatgaccccgacccccacccagggttcctgtgttccaggggtcaggcagaggccagtctgaacaccagctgccacccctaggttaccccaggaagtgcctgggagggcctcacttctgctggaactttctgcagggccctgtgggtgggtgagcgtctgcccaggagcactgcatgctcccaagtgagggctctgtgctgaggactcagttcctgggagaccttggaggggggtctcctggcatcggcctcgggctgagtgctgggcaggccaggttgcctccctgcaagcgccactttaggggaagcccaacttgcagtcacactggagcagctggcacagctggggacgtttagagcagcgtgctgacagtgctggaggaggggtgcagggcatggggagccagggcctggaggcaggggaggcaccacctgccggaggaatggcctgaaggaggctggggccagccaggcatccaccgcccttgtcaggtcagggggcccctgggacatctgggaaccagggctgaagtgggagcagatttgctgggggcccaagccaaaccctgacttctgtgtctatgcaggggttccagggcatggcaggggccaggggcactagtggagagcgaggacctccagggaccgtggggcccacagtaagtgcatttccaacacccaccagccaaccaaaggtgggggagcgaagggtgcaagccccacatgcaaccactcagggacttcctactgacagctcagggacttcctactgaccacctagggacttcctgttgacagcccacagacttcctgttgacagcttcctgtttactggcctggaacttcctgttgacccccctagggacttcctggtgacagcccatggacttcctgttgaccacccaaggacttcctgtcgctctcccagggacttcctgttgactgccagggacttcctgtttaccactcagggactttctgttgactgcccagggacttgtgtttaccactcagggacttcctgttgacggcccggggacttcctgttgaccgctcagagacttcctgttggccactcagggacttcctattgaccacccagggacttcctattgaccactcagggacttcccatttgttgttggaggcctgttctgagctgggagcttggtgttggtgctagtacaagagagtgtagctaagggctggttctgcacctctcccaaccccacccaggacagacgtggtggaggggaggtggtggggcggcaggctccatggagggtagggggacagacgtgggagatgggggtgtagtgtcccctgggggatgccttggccttcagcagctccatgggcccccccttaggtgggctccaggttcaccaaggagctggggaggtggaagaagacagaagacggcagggaagtgccagcacaggcctgacccgggcccggggcccgggaggggtctgttctctgggcagtgtcccacacccgccatctcccctagcacaaaatctacagccagaggcaagtcctttgtggcacaagttccagccccactcaggactctgctgcagaaccgagcctctcacatgcctgctctcgggtgcaggcgaggaccacaggctcctaggatctgggaatttgggatggggctttcacaccgccactgtggctatcaggctgcctgagtgaggatccacctcagggccatctcacacttgtcacgtgtggtctcaggccatctctgctgacttcttttctcttcccctcctcatcagggactgccagggcccaaaggggaacgaggagagaaggtaagtgaggctgagatctttggctcacttgggatctcctgggaaggcacctgccacacgggtcccaaagctgcaccaccttcccttccagggcgagccgcagtcccttgccaccctctaccagcttgtgagccaggcctgtgagtctgccattcagagtgagtgaggccagcagccctgcacctgtgcctaccacacctgtctgtcctcacactggccaggccgagggaggccgccttcacccatcgttagcacacctgggccaggtgtcctggcgtggcctgcacaggcctcgcatccccgggtccccactgtgtcctgctgacacccctcctccccacagcacacgtgtcaaagttcgactccttccacgagaacaccaggccccccatgcccatcttggagcagaagctggagccgggcactgagcccctggggtcccctggcacccgcagcaaggccctggttcctggagaatgggggcgtggtggccgccaccttgagggcagaggtactgggctcctggctcttggggagggagttgtggccggtgggggcgccggttgtcccctggtcctggggctggggcttcaatctgtgtcagcacagcagctcctgctggagatgccactgtccagcctctggggtgctggggtgaggacacggggcttccctgagcccacacaaagccagtcatggcaaagaggtcagcctcggcctggccttccagggccctcaagatgacctcttccccagtcttcaggaaacatgagctgcctgcttagggccacacaggagagcccagcctacctcccatccttcctcccgccctcccgccctcctgtcctccttgtcctccccactcccgccctcttatcctcctggctgctgcttcctccgcctctccccacccagcgcacagtcgcaggctcccgtgaccttgttggtgctcctcctcctctgaggcagcagcggtgggtcatgacttggacgctgagatggaggagaggctgattcggggagctggagctggagaggggcgtccacggggagaacagacgggggatgacccagccagacgaggactgagttctgcactggccggggcagcagcgggggcatctctgctctgttcgggcatcggctgaatcccacccctcatcccacagacgtctcaggaaactgggggcaacctggggggagccccgtgggctgtgggaacccctgcccccggcttggaagctgcccacagtggcctggttgcagcctggcagatgaggggtacatcactactcagaataaacggccccctctgcacccacctgtctagatgagggtgacaggcactatcacagggcccccacctgacgccttcccacctggccatgcccccccagaactgtcatggagcccaggaggcgcctgtgtggagcacggggacctggcacgctgctgcccctagatctcagactcccatctaaggaccagacctgctgcctgtgcccagggaggggccctgacaccctctgtccccgtcagaacagggccccaagccactgcattgctccgtcctcacatgccctccctttcctcgcaggggagcctggagctgttggtcagatgggcagccctgggcagcagggggctagcacccagggcctctgggagtgacaggtgagcccctgctgcctgcatctatctgccaaggctgagggcatccaggaaggaggagctcctgaggggccaacgggtggggcctcatgctgtccagggtggggtgctgggagcacaaggcccagcagaggcaggcgaggtggccctggggaaagtagggtcaactatggaccccgtaggggcaacaggaatgtggggtcacagggtgtggggtcacagggcgtggggtcacaggacgtggggttccggagatggattggcgtgctgggagtctgctgcacctcgtgggatgcagagttgcgtgctggggcggaggaggccctgaccagggttagcgcagcagggagagtggagctcaggtgtttgctcagtgggcacctggtccaagtgtgggaaagctcacaggagtcccaggaggggcctgtgaggccctgggtatgtcgatgagagaggcagggtgggggccatagtagcaccaggtaacctctgccttcctcaggaagcgctgggcaggcggaccctgtgtgcaaacttagctgaggggctggtcccagcagcaggtgtggggacagggtcccaggagcaggtggtgggtacagcacaactccggcctcaagtagcttcaggggccagagcgtggcgcagggtgtgtgacctggggcccatgaggggccggcacctttgagctaggggactcggcaggggctaggagggctgaggagcacaggcaggagacccaggggctcctggtaaggctggggcaagagggcagctgcctgagatgcccaagaatcaggtcagagcccagggctaagaacaagcagccttgcttctcctccacagacccgtcagagaatgaccccacccacggccctgcccgcaatcctgcccacttacggccctgcccatggctctgcccactcacggccctgctggacgcagtgtgcagagacccaggatgcgggctctcagggtggccacagtgccaggcgctggccctgagccggtgtccagctgtcttcggcctctcacatctgtcctcccttctctcctgccaggacattttctgcactgccccgaggaacgctgagccttcctccctgggtttgtctggacaccgagagcgaccacatcctggagaagccaggagaaaagctcaggaagagcctgcaggtggaaggagagggaagcagcggcctcggccaaggcccaccccatactcttggctctgtagcatttccaagttcagataaacccctgagtgctcacccagccaagcgaggcgggagtcatttcctgggagagtgtcccccaccctggctctgtgcaccccaccttgaggccctgcagcttcagccgcagtggggaaggggaggggctgggctgatggcgaatcgggttcaggagggcagcagtgccctgtggccgtctcagtagctctaaaacaggctcaacaacatgccccgcccctttctctgggcctcatctaagcctggccagggccctgtgggcccgcctctctctgcgcctcacgcaggcaacagatggttccactgctggcccaccagtcacctgcacgatggctcctccctcagaacagcactcccaccccggccccagcaccttcacatctgggcacaggcaggtccctgcctgcctcatcgtcccctctgtccccagcccaagaaggagttcagatcctgtgtgtgaatggccacccctcacccacccagccctgtgctgagttccttgtgcagggacattgctttgagacttggcaccatcagcccctggtccttagggtctcagagcaaggtcatccctcagcaggcttctggcctgtgcgctcctcagcacctctgcccaggtctctcccaaccatcacagacgctgtgtgagcctggacttcctgccttatccccactgtggcccaaacagcatgggggcaagctcagaacacacacctgggcttctgggccttgtggcccgtgggggtgatgtgggaacttctacttcctttccaaacaaatattcagtaactagtccactgttaccacttaggcagctaagcaagaaaggtgccagaaatgaagagggaagccatatcattgaggagagaatgaaaagtattaaaaaggaacaaagagagacccttgatattgacagaaggaaaacccaccaagatcaccagtgcagcattgcgtgcaccaaagcataccccaaagaggtgagcgcaaaacagcttcagggcaaacacttcatctatgattcaactgttccaggaactgaccagacctggagaccaaatagagagtcataggcagggtcagcaggatgggagagagcgcctgcacccacaggagccacagccctgactgaggccaggaagcagccccaaatgccagctcccactgcagcatgagaacagaaacagaccactgaaaattcccaaagtctgtggacaaatcagacgtcgaagaagtcacgtggcatcgagacagattttgcactgagggacaaggagagcatgtggccaaagtaggtgcaggtaaagcagcatctggggcagagttatagccttcagtgcaggtatcagacacagttgttgagagcagcagcccaagccagcccctccgtcctgcagggaggacacctaggtcacttggcttctgttggggagctgagttgcttcagattgtgtgaccagcaaaacagcttggttgctctcacttggtttctccagggcggggaattacatgtccccagctgaactgagaaggctctttgagcagtggagtgagcaggctttgtcatgaggcaggagtggggctagaatcaagcccagagcccacagggcatccagagccttccaaaggagcccctctcctggggctctccaatttgatgaagggactgggcactgggtggctgagaccacattggcagccaggaggaggcagcctggccggggggaaccagggtggctctaatccccaccaccccctcagctgccctacccccgccacgctggtgtgacaccagtgatgctcagcctcaaaaggggagtccggctgtcttcgggaaactgactttatgctggaggccaattaaaatggcacagcaaaggcagcggccagctggtgcccaggcagcttagggactggtccctgaggccccacccgccccagcctgtgcagtggagctgagtacgaatcaaaggtgaggatggcaagggagctgagagcagcctccggatgcaccaaaccggcctggctcctgtttgcaggaaggcagcctccccgagacccagccgacctgcacgtctcccatcagccccgactccaccgcatccctctgggtccttttaggagcccccagggactgagccggggctcacgctcctggccagagcgctgggtttctggcaatgcctcccctcctgcctttacggccacagctctcccctccagaggcccctctgtagtgggcctcggtcccctctccacccccagaggcagcacagcttcagccctacgcagtgtgggggctccgggaggaaatgcagggaggtgcttggtcttggcccagagctcatggccttaggtgctgcccccagtcacccccgtgcccatgcagccggggatgttcagctcaggccagccaccgaggtggtgtgacgcaaggctgatctgacgctcagctcaggccgctggggtcatgggggttgtgggaaggtcatggaatcacggggctcacgctggggtcacagggtggtgtggctgtgtggactgtaaggggcgtgcagccatgcgtatctgacctgccctccctaggtctgcaggcagtgccgagtggctctgcctgaggccccaagagcgaccttggaagctccaggccttcacagcccctctgagagccacctgcaaggtggggagctgggaagaacggctcagtgatgagctcagagggaggggtgggcacagcgcccaggaaggcgggtgcgtgcaggcctgggaggaatgtgtagcaggaggcagggggtgctgtgcccgcaggaccagcaggtgaggcgtgtccacccacagaggatggctctggcccaggcagtgtcagaaatggaagctgaggaaacccaaccccagctgtagaggagcctgccccgatgccatctgcacctggggggcgacgtatggctgccagcctcttcatctaccaaggaccagggcagtggggacgggagagctgggacacgtggactcacaccagggcagatggtgggggaagccagtgtctgtagattcagtgcatttcttggggaagggcgtggaacatttggacttgagccccagcacagagacgatgtcataatacagccccccatcgtgatctgatggtaagtacagaactccttgcccagtggagaaacactctcctctcatgtgtggaatatccacacactaaccatgaactgggccataagaaaccttacattccaaaggatcctgctgttcagaactcactcactcactgatgaaactggaaaaacaaccaatgataacaagctaaagaatgcctctagaagctaaaagacacacccatgactccacagtaattcatgggttaaagagaaaaaaggaaacgtgaagatacttgtaaccaaataatgatggatgcagcgccacgtcagaatctctgtgctgcagctgcagtggtacctagagggcaatttatagctgtaaatacagtgctttgttttgttttcttgttttttgagacaaggtcttgctctgtcacccaggctggagtacagtggcatgatctcggctcaatgcaacctctgtgccaccctgggctcaagtggtcctcctgctccggtcttctgagtagcaggaaccacaggcgtgcgccaccacgcttggctaatgttttttgtatttttttaaatagagacagggtgttgccgtgttacccaggctggtcttgaacttctgagctcaaacgatccaccctccttggcctcccaaagtggtgggattacaggtgtgagtcacctcaccggcccttaaacacagtttttagggaagattccaactcaaacaattttaaatagtagaaaataaaccctgaagcagtgtgcattcattagtactgtgtttgcctgtatttaattaaaacctgattgccattggcttccctaaatcagtttttgccatcacacgtaaagtcctgtgggcaggaatggacattgagggaatcctgggctgtttggccgtccttggcatgtagctgcccttcatcagaagatggcagatcccagcccttcatcacaagatagcggatccctgcccttcatcacaagatggcggatcccagcccttcatcacaagatggcagatcccagcccttcatcacaagatggcagatcccagcctgtttggccgtccttggcatgtagctgcccttcatcacaggatggcggatctcagccctttatcacaagatggcagaccccaggctgtttggccatccttggcatgtagctgcccttcatcagaaggtggcagatcccagcccttcatcacaagatagcggatccccacccttcatcacaagatggcggatcccagcccttcatcacaagatggcggatccccacccttcaccacaagatggcggatcccagcccttcaccacaagatggcggatcccagcccttcaccacaagatggcggatcccagcccttcaccacaagatggcggatcccagcctgtttggctgtccttggcatgtagctgcccttcatcacaagatgactgctgctgctccaggagctacacctcacttggcggaaggggcgggagtcctctgggtgaagagcaccagtgttaacaggagtcccacttggagacttctgcttgtacctaaggacaaagactgcaactctccttgtccagaaaacagacgttttagctgaacacgttaccacctcccacagagtgactaaacgcgccgtgtagggctcgatgtggcttcaagtaacaataataacaggataagagtggctctcgcagtgtggaagtgacattctcagaggcacggggaggcctctttccctcacctggctctgcatcctccacacaggacactgcccttgtttccactgttgggtcatattccaacaacaggaagaagaggagggaggagaaaggctggcccggaatcgggtcacattccaacaacaggaagaagaggagggagaagggcaggctcggaaccttgaagggcacattccaaaggtgtccttgccactgtcagctacatccctgtggccagacgtcggtctcacggccaagctgagctgcaagagtagaaccttttctggctccttcctgaggcaagaggggaaagggagagtggggccagccctgggccagccacggggtggggaaggtggcccccacgtcccggagggctcagtgaagtgcacctggccagagaaacgagagggccaccacagtgctggggcagagaggacaaaaccatggatgaagacaaggctgaaaaccagagccctctgacccattttacgccaacagatctgcaggcccaggtgaaatgggcgttcagacatccgcatttccagaagagtccccacagactcctggaaacaagatggccactaacagaggctcctgcctggtgagacgccaggactggggagggagcccgacaaatccaggatctgaacacagaaacggagaaaccctggggacgactcaggccaccctgtgtgtgcacgtgtgtgcgtgtgtctgcgtgcatgtgtgtgcgtgtctgcatgcatgtgtgtgcgtgtgtgtgcatgcacgtatctgcgtgtgtgcgtgtctgcatgcacgtgtgtgcgtgcgtgtgcgtgcacgtttgtgtgcgtgtctgcgtgcactgtgcacgtgtgtgcgtgtgcatgcacgcgtgtgtgacagtagcccacaagaaaccattacatgacaatggactgtctcctccccaaatccgtacacacacacacgaggcatgcatttgcaaacacacacccatacacacacgtactcacacatttgtgcatgcacagcgctgttatccatgttgaggggacgtattcacaagggaaggtggggtatctgagatcaaaagcattgggagagacaaaccggagaatctgtaccaggcagagaagaattcatgtttgttctctttgatctattaattttttaaaattgtaatctcttaaagaggcaaggagggatatcggtaacatgacgccagaattataggtataaaggaaaaccaactaggaatatgatgtgtataaaacataaaaagagaaatgttaaaagcggagctgtaagatcaggtctgagacgtctcccgggaggctttgggaaaagataaaaaggaaacagaaaatgtaagtgttagcacccacaccatgggggctctacgaggaaagaaacagcaagaggagggggaaaggttgaaataactgggttttctgaagatttgtgcattagagaaagatttaagatctcagattaaaagggcctagaacgtcaaatggaataaatttttaaatgtacccttaggttcctcaatgccatatataatgcagtacataatgatgacggtgaaaaacagtcttttaaaaatcttcagtacatatcctaaaattggaacgatacagagaagattagcatagccccatttgctgggatgacacacagttaaaagaaaaaaaatagaaatctttccggggaaaacctgcagcccagactacagaagaaccaggggccagcagaggagacgctgggacggtggctccacagggttcaagaaaacatgctcgcgtttcatatctacagaattatcacttaaatgaatgagacaaaaatacattctgaatccctgagactgtcagaaggagtcacacacaagatcgtctctgaaaataccactggaggaagtattctgcaaaaaaaggaaaatgatcagaaattacaccagatacctgggaaaatcccacagtaagtgtaaaacttagtaaagttccctatggaccaaataatcaaacccttcaccccagacaaatcatgtctgtggcaatccagagctgaaattctaggttattccagtgtggctggtgtgtgggaggccagaattcctgaaggcacgctggggtacttgttttctttggaggtgggaggcatttttcaggtcaatatactaagctcttgaaaaacataaatgcttgttttgagtcaggagcagtcaccagggaatgtgtagcttccagagcagctgactataccagttttctcccacagaagggatggaacgtatttccacaacaacaacaaaccacagagttggcctaaatatatcccgctgtagtagaaactgcaatacctttcactgatcgaaggatgaattctccaaatggcatttaaagatgacatgcagctttctgcttccagccgtgatggagcagtcctgggccagtaacagccacagagctgggtaacacgctcgcgacagtctccagccacgtccacgggaatggtgctcagacaatgagcctccacccttatctcacaccagacacaacagttaattcaaagactctcacctaaacaccaaaaccagaactacactttccaaaaggaaaaaacggaagatcacatttacagcctcggagtaggcaaaggcttctcaaacaggacacacgaagcactaaccattaaaacaaacagaaggaaaaaatgacactttgtcaaaattcaaagcttttcttcaaaagacaccattaagtgaatgagggctgtcagaggcagagaggacctactctgaccacaagtcctggatggaggttttacatccagaatgtacacaaaattcctacaactcagtaaaagcagacaatctgataaaacaatgggcaaaatatttcaacagatccttcacaaaaagaagacatacaagtggctcgtaagcacctaaaatggtcaacatcaccatcatcagggaggcacatatgaaaatcacagtcactgcaacagctaagacactgggtgctggtgaggatgtcggggcgtgtggatgctccagccaccctggaaaacaacgtcggggctccttacaaagagaaaagtacaggctgggcacggtggatcacgcctgtaatcccagtaccttgggaggctgaggcgggtggatcacatgaggtcaagagatcgagaccagcctggccaacatggtgagacttcgtctctactaaaaatacaaaaattagctgggcgtggtggtgtgtgcctgtagtcccagctactcaggaggctgaggcaggagaagcacttgaactccggaggcggaggttgcaatgagccaagatcgcaccattgccctccagcctggcatcagagcgagactccgtctaaaaacaaacaaaaacagaaaagtacaactatcctatgcccccagcaattctaccaggtatttgccccaaagcaatgaaagcaggtgtctgcacgaagcctgcacatgagtgttcacagtcactttaatcagagcaagtccaaactggaaacaatccacatgtgcattgattactcaacaaattgcagcaaatccataaagacgagtgaattacatcatatccacacagatgaatgaattacgtcatatccacaaagatgagtgaattaggtcatatccacaaagacgagtgaattaggtcatatccacaaagatgagtgaactacatcatatccacacagatgaatgaattacatcatatccacaaagacgagtgaattacgtcatatccaaacagatgaatgaattacatcatattcacaaagatgagtgaattacatcatatccacaaagacaagtaaattacgtcctatccacaaagatgagtgaattacatcatatccacacagaggaatgaattgcatcatatccacaaagacgagtgaattacatcatatccacacagatgaatgaattacatcatatccacacagatgaatgaattacatcatatccacacagatgaatgaattgcatcatatccacacagatgaatgaattatatcatatccacaaagatgagtgaattatgtcatagccacacagatgaatgaattacatcatatccacaaagatgagtgaagtatgtcatatccataaagacgagtgaattacatcatatccacacagatgaatgaattacatcatatccacaaagacgagtgaattacgtcatatccacacagatgaatgaattacatcatatccacacagatgaattacatcatatccacaaagacgagtgaattacatcatatccacaaagacgagtgaattacgtcatatccacaagatgagtgaattacatcatatccacaaagacgagtgaattacgtcatatccacaagatgagtgaattacatcatatccacacagatgaatgaattacatcatatccacacagatgaatgaattacatcatatccacaaagacgagtgaattacgtcatatccacaagatgaatgaattacatcatatccacaaagatgagtgaattacatcatatccacacagatgaatgaattgcatcatatccacacagatgaatgaattatatcatatccacaaagatgagtgaattacgtcatatccacacagatgaatgaattacatcatatccacaaatacgagtgaattacgtcatatccacaagatgagtgaattacatcatatccacaaagacgagtgaattacatcatatccatacagatgaatgaattgcatcatatccacacagataaatgaattatatcatatccacaaagacgagtgaattacgtcatatccacacagatgaatgaattacatcatatccacaaagacgagtgaattacgtcatatccacacagatgaatgaattacatcatatccacaaagatgagtgaagtatgtcatatccataaagacgagtgaattacatcatatccacacagatgaacgaactacatcatatccataaagaggagtgaattacgtacattcaacagcttgggtgaataccacaaggactaagttctgatttcctatcttgcccaaattcctatcaaaagtgtctggggagtcatgccctacaaactatccattctcaccagatgtgttttatttgaccctatatatcgtgacttacttcccagtctcactctggtgtaacattatgagacaaggaaaaaaaaaatgttttacgccaaaatatatttccttgccataccttgaaattgccctgcaaagtttctcgcgggaaaaaccgacattctatagagaatccccttcccctttgttttccttcctttccagatccaggagataatcaactaagagccaggcacccttttaggtccaataagaaacatttcacaacctgctgtctctgaagtctgctatctgagagcttcctctgcaccaatcaaacttggtctccacaatcctttatctcaacctgaacattcctttccatggatgccaggtcttcagacaaactcaaccaattgtcaaccagaaaatgtttgaattcactttgaactgtcccacctttctgaaccaaaccgatgtatttcttaaacgtattgattgatgtctcacgcctccctaaaatccataaaaccaagctgcgccccaccacctcgggcacgtgtcctcaggacctcctgagggctatgtcatgggccatggtcactcagatttggctcagaataaatctcttcaaatattttacagagtttgactgttcatcaacaactccaaacgccatgctgcatgacagaggctatccacaaacgcacctgttccacctacatgaagttctagaacataacagaaatgatccacagagctgggaatcacatcagcggtttcctggagcgcagagggttttagctacacaggacacgaaggagctctctgggtgagggaaacgttctgtgtctgactaggatggtgcttacgtgttgtctgcaggaaaccttccttatatgtaatcaaatggagcagcaaagtgaaaaggagagactggaaagggatctaccaacaactctcaaaagacggccggagcgtttacgtgatgatgagaaaggagacttgagagagtggcacggtacgagggatagagaggccgttacatagtgagcaggtgccccctcgcgagaacacagcaaccctgaatgcaacctaacagagcttccaaatacacgaagcaaatgccagcacgcctgcgagaaggggcaaagccacggttctccttggtgacttcagctcccctctgaaacctcctacaccgtgtagacagaacactggcccgggtgtagaaggcctgaaggacacctcagtaggcgggacctggcgggcatttctagaatgttccctgaaacagagccgaaagatgtcttcttttcaaggctgcgtggaaccctgatgaggacagaccatatgctgaacccgataacaagcgtgaaggatttgaaagcactgaaattaaatggaatactttgctgactccagaggaattcagttagaaatacaaaacagagattcaaaaacctgacaaaataggcacgtcatagaagaaacgtgaacagccgataaacgtgtgagaagatgccccaactcaagtaactagagaaatgcaatttaaaacacagagagaactgtattcccaccagactggcaaaacttaagaacccttggtacaggggggagaatcggagccctgagaggaggtaacgtcgatgcaaccacgttggcaaacccttcgtcagcagctcattgagccgaccacgcacccttccttcccacggcagagcgggagctcctgggtcagcctccctgccaaagtctgttcacagcagccccgagctggcgacgggtaaataagatggtggagccacgcggcggagcccgcagcacagtggccgcgcagcgagcaatgacccgggatcgggagccgacagaagggcacgcctggcgcggccacgcacagaacccagggccaggcaacgcggggcagaggtgttgggtgacctcgggcgggtcgtggccggccgggctgggcaggggattcctgggtgccggctctatgcgaatattcttcagtctgtgaaagaaaatgccttgtcatgccgctgaggattcatacgcacgctgtgtaccttaccccgcgaggcaggcaaatgccaagaaatgccagctcggattagcgcagcgggagcgcctgtctgcagacagggagtgtaaacggcacagtcacgtggaagacacgttggcattatctcctaaaacccagtgcaaacccctgacaatcccactaccaggtgttccgtcctaagcagcgagcttccaaccgtgggtcaagaaatcagttttgtgggttgcatccagcctttcctacagactgaaatagaagacacttgaatagaaaatgcaaagcacggcacacgtggtgacggtgcgttttattcattgaagtctgtgcacacactgggagcacattccagggcttggcagacattgcctgcagaagccgggcggccgcacctgggctcggcgggccacacggtcggcggggcttggtccatggggctggccgggcttgcatccccaggtgctgtgtgtgctgcgcctgatccagcatttctggtgcaaggtgaaaggactcagccactttagaaatccgaagccgcctctgctccaggggacacctaacccagcagtcccacagcagctgcgtgccctagagtgtcctgggcccggccttaacttacaagggagcctgagtgacaactccggaggccagccattgagagattaccacgcttcctgagaggagggccacgtcgccccaggccgggccacacgggaagcacccaggccggtccggaggcagaaggggctgggaagccctggccagggccttcactggggcctcccctgggaaggagggggcaggatggcgcaagcagccgcagaggggccggcgccccggcaggcttcgagctgcagcagtgtctcccgctgcctggtgcctggcacagggcggggaaacgttggcttagtgtgagactttgatagggggtcgggggtcacagccctggcaaggtgggttctaggcaagctgtccacccccgggaactaactggccctaggaggagcagtcctgggtctgaaagatgttaaaacattaacagatgcagaaaataaacatgcataacggatagagtgccatgcacacaccggcacctccattcctaatcaccgacagctgcaagcaaagtccactaacaggtgatggacaaactgcgtcttagtttattcagacagaagaacactgctcacaattaaaaacgaaggaacagacagcaaggagctacggacacacacaacagcacggatgaagctctaagtcataggatgaagaagccagacatcaaaggctccaactgcaggattctgactcctcgaaggtcgtgagccggagaggtcaatccacggtgcttaagtcagagccacagatggggagggacgccgacaggaagggctggagggaccttctaggggctgggtctccactgaagagcatgcatctcaccatatgtaaattttaccttaattaataaaaacagcactggacgcaaatacgccaacattgttgtcaaggttaatttggcgtggtgggaatatggtgctttatttggattttttttttgagcctcaaaaaaaaaaagaaagggaaaggggtcttcccccaggcaagcggccacccccggcaggagggtcccccggcaggagcgtcccagccactccgcagtcactcctgacccagaaaagaacaaccacagctgggcccagcaccccgggccactccctgcagctgcccacacatctggcagctgggtccacttatgcaatgtggatcgggcttcttacatctgaaatctgcgtctctatccctcctctgagaccagtgtctcctgccagcttccatggccccgggatgacctcactctcccagggtctccctgcgtcctgggagctctggccgaggagcagcaggggctgatggcagagcgggggcaggtcagagctcagcagatggggtcctgaatacacgggggatgtgggaggggccagggggctggggatgcccaggatttggcacgggggtctctgtgtcccacccactcctggcacaaaagccccagcctcaggaccccggtcacaggcacccgggggtgggggtgaccagcagcagttcagaggcaggtgtgggcaatgtgggcctgagtctcctccccactcacgtcactgcccgcggggacacagcggcatttctggggcactcggcatgccgggttcctaacctcaattattcattctgctctcaggcacctcctgacgagaccctggcccaggagagctcggctcggggacagaggaatgagactcagtgggacgcagagcccaaccccatccccacccctggctggatggggtctgggggcagcagaatgtggaccactcagcaggaggcttcctgactgtctcctcctgaaccgatgtcactcacaggcaggggacacgccatcctggccccgcccctctgggcccttggaatcatggaggggtggggcagcctgtgcccatcccaaggggaagtgtgcccctggggacactggggggctgccgggtgcgccatctttagggggtgcactgccgggctccagggtcatgcctggaaacatttcaggcctccctcacctctggataccgcctgcaggggtgaggctgtgctgagctctgcctgccctgccaggacggagggcatgggcctgtgtggaaaccccagggctccctgactcccatgaggcttctcagggacttcctgccccgagggtcccagcatctcccaggtggaggtcctcaaggatgcccccaccagctccccacagctactgtagcaggaagtccttcttcccgaacccagagcccagggcggatctcccgggctgcgcgccaaggtggaaaccctcagggtcctgggggaaccagggcccaggtctggactccattcgggaccttcccagctccggggaatcacaacacagaagtaccccaggggctgaagccactaggcccccgtggagccctggccacctgccagagccctggccctacgcctggaaggcagagtcctggtctccagactcgctggggctgggtgttcctgtcccccgcggagggcctgcgcaggggagagctggtcccgcgtgggcctcccgattctccccacgcggaaccagctccacaaaactctgttctccaaggctccttaggcacaagacttgagttctcactaacttacccaaaacacaaccaaacacaatccctgcctggaccctctcctagcgaagcagattggagcgctgctggctcaccctcatggggcccgagaggctcaaggaccctgggggagaagttgaagcccacacaggcgcaggacacggtgggtgggagaggcggccgggcctccagaagacggggcgcttggggctgaaggggcgtgaactcccttcaagggccccttggggcggtcgggaccatcaccagatctgctgagagactgggaggagtgagttccatctgcaggggagctcaggagactcttgaactggacttagcccgagtcctgcaggtagaaggcgccgacccccacctctgctccaagccactgcctcctgaggccacagtccaactggaagcagctccacactcggtctccccagaggccgtgtccccgtccaaggccgtcttacagcagacacagaacaggaaggaaaatttggcaaacgtgtggccccacagagtccagggagaagccagcccggccccaggccggccgcatggatgctggccccgtgcacggcagccccaggccacgcaggctcccggtcccttcctagatcatgccagccagccagggcggcaggaagaggcccaccgtccccagcaggcagacgatgatgaacatccagaggaagatgcggtcgatgaccatggccacgtacttccagtcctccttcacctgcaagcacagacgccgtcactccagcacggcccggccgccgccagcggggacagccctcaggaccccggcgccgccggcaacagcttctccacctcccaccttccacccgaggcagccattgctgctggtgcacgcggcacacagctgcaccgaggggaggaattggggtgcacgggacagccagtgctctgcggggggcatcatcaccatggtatggggcaggaggaccttgcaaccctgggaattctggctgggcagacccccttgtggagacaagctctgcactatgccctgtgtgcccccacttctcagcaggcggcctgtgctccgggaagggggcacgggggaggggggctcaggcaccccgtgagcggtctgctctcagctcaccagcgctgggagggcccatccccctccccgttttgcagatgggcaaatgtggcccggtgggcgcacagagggcggacgaaagcagcacacatggagcccgcagagctgccgccatctgcagtctctcactcgagcctcccctggcctgtctcgttttcacactgaggccttcaggggcggctgcggttacatatctgaacggggacagcgggttccggctccaggtccggcttctaaccccacactcctggggctgatgcagggcggacctcccccgggtgacccccaggagcagaggcctagggagggcagaggcagtggcctggtcaggcctggagtcgggaagccactctcgagacagccgctgtgtgcagcccaaggcactcatgccgctggccactgccctcgccccggctcccccgtcccgcgtctctggctctgccgtgtaggacctgagacaacccccaagctgatgagctgcctctgggcccggccgtgagggtgtcctgggtcccaggcctgtggatgctgagggatgggagggatgtgccgcgggggcctgggcacactgtggggacagtgccgcctcctgctctgattgtttatagcaatcccgggtctcctgatggtgttaaactgaaccaaaacggccgcatttatctacgggaagcctgaaggcaaacggggtcacttataaataaagtcctgcccaggcctcggctctgggggcggggacgcggccgccctctcgccctttcctatgtgcctttagttccctgggttctgtgtgccgcgttccatccaccctgaagatgaaacgcagccgcagaccaaagccttccctttgtccccgaggtggctgctgtgaagtcagctctgctccccacaagcccagaaccaggtcaggcagcggcagcaatcggcccgagaaggctgctggaggggcccagggcgcgcgaccgccgagctcagacccactgccagcttcaggaccgctttgatcaaacacctaaatgcatctgaccccacggtggcacagcccgggcacagctgcctctcgcttcaagagctggcagcaaagcaggatcccgatgcttctccaggctgctctcgtgaccccagaatgttctggaacctgcaggaggttttgcagcttcttgggattcagtggggtggctgtgtggggcgagcaactccctcacttttcatgggtatggagcacgggcccctcgctttggggctcgctcagctagtgggggcaggcaccagatgcgtccgaataaaccatcgaggatggcgctctggggtcctggcagaggtggccccttcagacggaggtggcccactgagggcaccaggccctggcaccgggacaagagccaggaggtgccggcgacagcaggtggatggacaggacagatgccgaattgccgctgtggacgtcatgggctgcacagccgaggccgagacccccggccacctgtgtgccccacccgtcccgccccattatcctgtccgtggaccctggcccctgtgcctccccccatgtgacaggcagtaaatgtctgcagaaggaaacagggaagctacctggtgctggggtcaggcaaagctggctcagccccagcctctcctgcatggaatgggtaggagactgcacagccacgggtaacacggacatggctgccacttagcagaaactgtggctcctggggcctctgtgcggccagtgcctggcgctggagggtgagggtaggtgggctggccccgggccccggggggccttagccgtgggaccagcgttctgcccccagcccctggctctcccacctgtccccagcttggccgtgtggggctgatggtcttggagctgtgtccctgtcccagctccgtcctcctgccaccagcccatcccatcccatcttctctgagccccctacatccaggccccagatacggaggggccccggggaggcccgcggggcaggcacaggcgcactctggagaaagggccttggcagtgcctcgttgcgttctggggacttggccattgctgggcaggagttcccagagcgcccccgttctgtgctggaaggacgctgcctgtggcccctcaccgtgccgtccgccgaggcccactgtgtcccaaagccagagacggcaccgggatccaccctgtgccagccactcggggccccctgccccgctcagcctgggacctgcggccacatagcaggcttgggaagaggctgctgcagcaggggccacgccctgcaccccaaagcgaagcagcctgaggcctgggcccggctcctggattacacaccaggaagaaagggcgtccgccggttccgtctgggtcagaggcgcccaacacagccatgggcgggacttaccgagaagtctgtgtcttcggccttcaggtggtctgcaatgtactggacgccctccaccgcccgggtcagggccggcgacaggggcaggtgcgggggcggcgctttggtgctgcgggtcttgaccgtggcgctcggggacaccgaagagggctccttcttgcatgtgcatttgcacggagagggctggtctgggggtgggagctcagccgagtgggtgttgcgagaggccagggcgccggcagcctggccatctgcctcgggggcggcatcgtctcggggaacacagtactggatgctccgagaccggcaccggacgccgccttccaccgcttcgccagggctggacatgtgctggacgctgagggacctggctttggccagccctggtgcctgggtgccgtggggcgggcggcagggtccaggcgaggggtgggggctggctttctcagcttccaggggctgctgaggagggagctggtcggagggtgacttgcaggaaggcccaggctcagccggcacatccagggggacacagaaggacggtgagggcgggtgcaggctctgggtgccgctcgtggcagggggctccccttctggctcgggccagaagcgcggggcactggccatcttatgcatggactcgatgagccgccggcaattgtccttgaccacggacggccgcttcatgaggagcaggcgtggcacgatgtccaggaagaccctgcgtacccaggtgggcatggtgtgcgtgcgtggcgagcggtggtgcacgttgagcacgaagaccgtgatgacgatggacagggtgacgaagatcatggtgaacagcaggtactcgccgatgagtgggatgaccagtgaggtggacgggatgatctcggtgatgagcagcaggaagacggtgagcgacagcagcacggagatgcacagcgtgatcttctcgccacactcggagggcaggtagaagaccagcacggtgaggcaggagatgagcaggcaggggatgatgaggttgatggtgtagaagagcggcagccgccggatgacgaaggcataggtgatgtccgggtagatctcggcacagcactcgtacttcctggtgttgtaggtgcccacggcatccacgatgacccactcgccactctcccagaagtccagctggtccacgcggctgtgcatgttcaccaggtcgatcttggccttgtcgtaggtccaggagccgaatttcatggtgcagttctgctggtcgaaggggaagaaggtgacgtcgatgctgcaggagctcttgtaaatggccgggggagtccactgcacccgcccgtcatggaacaggtgggccttggtcaggtgggtgaccgcgaagtccccgtcagcactgggcaggaagagagcgaagggtgtgagacccccacatccatgcccacgtccacacccacgcccactgccacacccatgcccacgtccacacccacacccacatccacgcccacatccacgtccacgcccacatccacgtccacgcccacatccatgtcccacgcccacatccacacccacgtccacgtccacgcccacatccacacccacgtccacgtccacgtccacgtccacacacagaggcattctcacgtcacaggagcacaaaagggctggcggccttgcccgggtacactgttcgtcttctcacctactcgtgcacctcagtttatcatccctgagctgggcgtagcacgtggttcagagaacgggaagggacctacgagtgcctgacacacataatcactgctgctggtgattacccttatccatgagtggcgcatggatggggctagtctcccagcgtcacctcctgggacacacggcatccctatgtccccgcccctccaagcagcaccccgggccaccatgggaattcctcacccagcttctgccgttaaccccaaggacttggaggccacctcccagtgtgtgagcatgaggacaccaggggccacagaggcaaggacaggtgttctggccacccagggccaatgcagtggggctgcatacgcactgcccagttccagggccacgtctgagccactggctctggactctcttttgccttgggggacgtgggtgttctgtccacaggcccaggtgggcaacagagcaatggagcgaggggctgatgtcccttgaactcctcccggtaggcagagctcccagccccagcccctggttccatagacagcggctggctgggtgggacgcactgcaggagcacattcagggctgaggcagccaggctcacgggggcagcagccgaccctccacccccacccacagaagtccccaccaatgggaagcctgaggccccattaaatccccagcgttggcaggcatggggccaggctcagctctgtggagggcgctggggcacgacgcgtcggggggagcggctgcccagccacacacctcctgctccacctctgccaagctgcctggacccctgcccatccctcctctgcctcattccctgagagcctgctcaaaggccagggcctctccaggtacttgggcagagctggcgactgttccctgagcttcctctgtgcctgcccccgagtcccagggctggacctgcacctcaacctccctcccaaccctcagggaccctccctttgtggagccgccactgctggagctctgccctccaggtcgtggagacctggccccccacggtctcagtcggtgctgagcctctgcccccctgaactggtcctgagccaacaccgccggctgggctgccgctcagctgcagagggagggagacccagcaagagccaccagctgcatctcaatgcggctccggcccagcacagcctggctcccgagcgtccctccagcggggggcggggctttaccaccaagtcagtctgggtggaatcaggctcaagtttgctccctctccccagcccatctctccaaaaaccaacgccctccaccttctgaggcacaaattaaaagattctcatatggcaagcgggtgactactctgttcagcacacactctacagggaacgccagggccatgctcagggaacagtgcaggtctgcgccactctgggcagggcccccctcccccagggtcctctgcccgcgccacaggaaacgggacaaggtcagggccaggtcccccagcccccaggtcccacagcacccctgggctgcatcactgctgctccctgccccgcccacccctggctccagccgccctctggggagcctttgaggagaaccccgtttgggctgaaccacccggccgtgagccggctctggactcgcaccataaagctgcaccctgggagcagacagggtctgaggagccgcccagtccagcaggtccaggttcctgctccagggcccacaggctggcgtgagaccctctgtcccctccaccccgaccccagtccaggtcagggatttctgggcacctgccccaagtggacagcagggcccccaactgggggtggccaaatcccagagaagggccgaggcctcccaccctgcagcctggccggccaccagccacagccacctgctgccccagaaacaggcctcctcagcgggagcagacccagcaccagcggccactccaggaaccctgggtcctgtccggagagagcctcggtgacaatcccagccccaaagagaaaactggggtcaccccactacatcccacaggccatggtgaggaggagacacaggagaacatggggtggcagcaatccctgctctcctgagctgtggtcctagggggctgtggtcctaggggggctgtggtcctgggggggctgtggtcctagggggggctgcggtcctggggggctgtggtcctagagggggccatggtcctggaggggctgtggtcctgggggggctgcggtcctggggggactgcagtcctagggggctgtggtcctagagggggctgtggtcctggaggggctgtagtcctagggggctgtggtcctgggagggctgcagtcctaggaggctgtggtcctgggggggctgcggtcctgggggggctgtggtcctaggaggctgtggtcctggggggctgtagtcctagggggctgcggtcctagggggctatggtcctagagggggctgtggtcctggaggggctgtggttctagggggctgtgaccctcgggggggctgtggttctggggggactgtggtcctagcgggctgtggtcctggggggctgtggtcctggggggctgtggtcctagggggctgtgaccctcgggggggctgcggtcctgggaggtctgtggtcctggggggctgtggtcctggcgggggggctgcggtcctaggggtgttgtagtcctagggggctgtggtcaggcaagaactgtgatccttgtgggggctgcagttctgcaggaggcactgtagccctagggtgggatgaagtcctgggaggactgtggtcctggcagggaatgtggtcctgggggcctgtggtcctggggggctgtggtcctgggggggctgtggtcctggggggctgtggtcctagggggctgtggtcctaaatggggctgtggtcctggggggctgtagtcctggggggctgtggtcctagggggctgtggtcctgggggggagctgctgtcctaggggtgttgtagtcctagggggctgtggtcaggcaagaactgtgatccttgtgggggctgcagttctgcaggaggcactgtagccctagggtgggatgaagtcctgggaggactgtggtcctggcagggaatgtggtcctgggggcctgtggtcctagggggctgtggtcctagaggaactgtggtcctgggggagctgtgaacctggtgggggctgcagtctttggagggccgtggtcctggtgaggctgtggaagtggggggggctgcagtactcggggggctgtggtcctgggggtttgaggtcacagtgggggctgtggtcctcagaggcttcgttcctgggggctgcattcctggagggctgtgcacaggcacccagagcggcttctctgcccggcccatcctgggcgtttccacttctccctgaaatgtgtccatgcgagtcacacaggcggattcggtgcatggtcctggtggcggggagctaggtggctgggtggcttgcagggggcagggagtctgtcctaagggaagaccacccgctgcccactcaccactgaccacctccccaatgcactctggaaaagcgtccggccctcccactgccggaggcccttcccgctgccattactggaatcaattgagttggaagaggagcccaatcgttcttaatcatacagcagggtttgtaggtcaggcgggtgccctggggcctggaaagggctgtgggcagatggctgggacgggagaggaggaagagcttccatttgctttgtttgtgggagctgtgaccctgccacacccagaccctgagcctgtggccagagatcatccctggaggactcagctcagagagcgctggctgccgggcgcagggccctcggcacagatctgcaggaaggacaagttagaggacagcagcctccggaggccaccatctgccacggccaatccgtggcaacgctgccctggcttccaggcacagaaaacccgtttccatgaccagacttcatcttggcctcctaggagcctgacatgggcttggcccagcccgaggctttgtttgtttgctggggacctggcgtgacatgtcctgggcagagcgtgagtatgcagagaaagcagaggccctagtggcatgagaaccatctggggcttcctcacccctctccagggcaccctgcagtccacactattctcccagaaaggccaggatggggtctgatggcgaaaagcactcctgcccaaaagggctctcctgcagctgtcaagggtgggggcaaagacgtcgcgggtcaggagccagcccccaggcctcaggactggtccaggcagggacactgtgtccaggtgccatagccactctcaggcccctccggctctgacgctccagtgctgagacccagggatgccctcagcctctttgctggcctggggggacccttccctcctcaacccacaccaatttctccattgctcctgcttcttccttcctgggcctgggctggcatgcatggggctggcataggccccgctgggccaggctgggccttggtggagctccctgtctgggcaggggcaggccctggccactcctgcccaccaaggccctgtagaggactcacttgttgtagaggactcacttgttgtagaggacgatgtccggccgccagatgagctcggaggggatgcggatggaggtgacattctcatagtcagctgggtcccagcgcagcttgtagtcgtgccactcctggatgaggtggggcggggggaggctgcagggtgaggggtgtgggggagggcaggggcgggacagggccagggtggggcaggggcagggccagggcagggcagcagggtgaggggtgtgagggagggcaggggcgggacagggccagggtggggcagcagggtgaggggtgtgagggagggcaggggtggggcagggccagggtggggcagggccaggacagggcagcagggtgaggggtgtgggggagggcaggggtggggcagggcagtgccctcccactcacctgcttcacccatacgttcgtggtcatcatctggttcttctcatcctagggcaccgagagaggaagggggccagtgaccccttggtgtctttctctggccctaggtttcctcatctacagccactggcacaaggacacggccagggcaagatatggtggacgggcgacctgtggagggggtgagtgccccgtccctggaggcagccgagcccaggatggggactctgaggggacctagggatgtggggacaaggccacaaacatctccagcaggaaactggagaggagtcggcggcctcacaggcttccccagctaaggacaggtgtggcgggcatggggagcctccttctgcccacctgccttgctccctcccggcccttgggggcagcccctctgcagacaaggcccccatgtgggcacacacagccagcaaagctgcccctggcacataagtgggttccactgctggccagggtggcccctccaggactgtgcctcatgacctgagcaggtgggacctgtcactcaaggtcactgtgtgcagctgggccactcaccccagccccttccgacccaccccacccacctccttccacatccccacaggaccacgtccccaccgaccacatctccatggaccacatccccacagaaccacgtccccacaggaccacaacccacaggaccacatctccacggaccacgtccccacagaaccacatccccacaggaccacattcccacaggaccacgtctccacggaccgtgtccccacaggaccacgtctccacaggaccacattcccacaggaccacaacccacaggaccacatctccactgaccatgtccccacaggaccacgtcccacagaccacgtccccacagaccatgtctccgtgcagggccatatctccccacaggacctcatcccctcaggacctcatcccgtgtgtctgaggaagctccagggtcctcagaaccagcttcacgtggccaggcctggccctcctgcccagtgtcgtgccctacccccttgcagccgtcattctcagtcgcccttgaagctggagggcaggtcaacactgcacatttcaccaccactcagcactggcctgggctggttggaaaagcactgggtcttccagaccctcctctgcagccagtcctggggcctgagctcacacgtgcagctcacaagccctcccctccaggacagaccctggtgatggcacctataacaagtatccgagcccgcaaagggggcacaggtgaatccccagcccctggtgggacgggcagagtgggccagacacaaggcagccccttccacatacacgtggtcctcagccttaggccagcacccaggagcatcaggcagccccttccgtgcacacgtggccctcggccttgggcacccaggagcgtcagcacccacgtgtgcatgttcgtgtaagtccttagtcggctgcagggtggagagaggggtgggcagctctgggagtcttggttctgggtgtgctccaggcctcaatgtctcctgggcaaactggggactctgtggtggcgtagggagccatggattgagccctgagaagctcaggtaggcagccaggtggggggtggcagacccagagccttgggcagctgccagcggccgcctctgccagctatcactttgcagccgtgtttgcaaacctcagcaggcttgccaagcctgtgcaacccgcattgtcttctggctgggcctccgccagggacactccacaggagccactcaagggcagctccaggacactgaggctggaggtctgggtggccaaccctggacggggctggctgactggagtctccatgcgctgccctgcatgggcaactgccaccactgagcagcctgtccgcgggaatgtggctgcagctccccacacctcccaaaagcccctggggtgtggcccactcagcctgggatagtgaagcagctctcaccccgtttcacaggccccaggcccagggttacccaacacgcacggcaccagcctcccaaagagaggaaattctcccgcaacccggtggctcctccctcagcggcagacccaggcttggcatcctggcaaggtgtgggctgggcctctacagcatacaaatgcctccccatgtgggggtgccctccctggaccagcgagctgggatttggcagcagggctggagctggcggacttcagtgtggaagacgagcccctgcagctcagctggccattggctgcccactcgcaagtgggccagctcccagagaccatggcctgcccaacctgccctcctccatggtggcagcccccaggctatgcacccccacccagccaggtaccctgagggatggtctcaccccatttggagtggctgagcctggctgggaaacgtggaaatgtctctgctgccccttacccggcccctccagggccgccgagacccccagacagtctggctcaggcctgggtaggtaaccaagcatctcaaccgagcacaaggccgagcctcccgcagctcagttctctcagcctcgaagcctcctggttcctatcctgccttggggctccatgtgcactggcccacgctgcaggggcctggctggaccagtaggcttcctcccagcagccttcttgggccccccaccagaaagaacatatcttcagacaaacagacttcgcccaagactcccccaaaccccacattccagatctgtgggtgaggggcctctggggccagctaaggttggggtgctgccgggacaccacagtgcctgctcctgccccggcccctgccccggccggttgtccctgttgctccgaggtcacagcgtgccccgccacccccaagcaaggcctttgctgttctttgcttccgaaggtgcctgggctctgtactgagaacctggccacttggagtgttcccacgtcaagggggaggaaagggcagggcctggctgggacgctctgaatcaacccttggctggggctcaggcggggcagagctggtggctgtcgttctgacgtaccagcccgggccggacactcacagccacggggagtgttgatggctgtgtcccctctgcccacccagacccctgtgctccttgcagggcgacctcagtcacagtgcacgatggccacgccctcacctaccacgtcaatgagctgagcgatggacaggccgaagcggacgaggaccacgtccgagatgttggccacgggtcgggaccacttgttgtaaccggagaagagtttcttcaggagccgctcctcggcgtgggcccgggtctccacatggctgctggctgcggggagaggcaggccagtggctcaggtgcaggcgggacaggagccgggagctgtccaggagctctccaggctgccccagccccctgcccagcacgtccacttcctttcagctcctcacatgagcccttcccaccccaggacctgtgtgtgtgccgggcgtgcgctctgtgtgtgtgtgtgtgccgggcgtgtgctgtgtgtgtgtgtgtgtgtgtgtgtgtgtgtgccgggcgtggcgtgcgctgacctctcttggcctccggctctctcccacccctgggtgtaattgtgatttcctcggggaagcttcccaggcccctcagcccacggaggccttcccagcaccttgaccgcaccacaaaaccaggcggcggatgggccgaggactgctttgggtctcctgtcacactgacttccagggaagggctgtgtctctagcagctggcgagtcagaggacactcgggggtaacagcagcaaaggagggagtacagggcagcggggccagcccaggcaggaagagggaggaaggggaaggaggatcgggcccccacaagcgcccgcttcctacggaacctcccctggttcatcaatcccctgatgcccgaggagtgtttcagatgcagaccccaacgaggtgccagccccctccgcaccccagcctgcccgtgctgttgggcagacccagaacgcccctgatgagtcgctctggaggagcacagccctaggtccatctgtgctccaggtccggggccccaggatctgaggcattccccgcctgtcctgggcgctgccataaggggcgggtctgggcggagggggagacctccacctccctggtgggtcccgctggcctgagagcgcagacaggactcggggagggggaggggtcagttctacacccctgggagccttgactcccagcccagagtccccacccgcgaccttgtccttcctgcagaaaaggtgggtggcggccgccaagggcagaggccacccctctgatcccctaaaccggaggaagcaggcatgggggtcttcagggaaatttagctggatggatgggggaagggcgaaggtggccccacctctgctcaagttcgagcttttggggccagccctgaaatagcagcggaaccccccacaccccgcggaaagcccctttcccagccctccgcattcgccggcggtcaactccctcctcgcctggctcagcccgggtgcgagcgcagcctgtgcggctggggatggggagcctcgcggtcgcccagtcgcgcgcacccgcggcttgggaccgcagtcaggagcctgcctccctctggctctgggggtcccaggccatccgaacgcgggcgaaagggggcccatcccgcgccccgtaacttaccgcgcaggaggccggtccccagaagcagcagcagcggcggcagcagccgcggcgctccggggccccctagctccatggcgcacgcacctcgcgggctctagatgcgggcggctcccggctccccgccgcttcgaggcccgtgcgcgcccaacttcatgcctcccgcgcctcgcgggccgcttcggccgccgggcccggttcgtcttctcctgtggggcgcggtgcggcggcggcgcggcagggagcgccgggctgtgggctccgtggcgcggccccgcccggccctgcccgcctcagccggctgggagggggagcaggggaggggggaggagggggagcaggggagggggagggaacggagagtgaaaagggaggagggagcaagggccagggagaatgagcagggatggaccgcgcgcccagggggacggggaggctgcgctgggccccgggcgggggtaaagtttccttgttctcctggggttcgagacgtgcctgagccggggacggggaccccggggtcactgagtgcgactggggggtcccggagtcagtctgacctccctccccacatctccagcctgggcgcccgctccctgcctgcaggggtggggggcacatctaggggatccggcgcaaggaggggcacccctagcacatctgggttactccatcgcgccagccggtgtctgcagcctgaaaatcgcgtctctggtcttgttccccagcgagccgttcaggactctctgtccgcctgcagcccccgccttccctggtacctccgcagagacccaagaggcgtccagaggggagcccaggcgcacggtccccagggaggggccccgccctcaggtgggtgccgaggtggccgcccacagagcagcaggtgcgttggaggaggggcgccttgtgcggctgaatctcgtgtgcaggaggagagggcgaggctctgcagaaacatcagacccggccatccctgtagccgcgcccctggcccagcctcaggctctgcagctgggacacagcccccgaaaacggagatttccgtcgtcggtaatggaaggcagagcagaaggggctggagaggtccggtgaccctccgcattcacgcccctccctccaaggctgcaaggctgctggtcgggcgagggggctccgtcaggagttccctgcagcaaccccctctccagcacaggcctctggagccctacagctcctgcccctcccatcgctctcccatctcccctgtccctaccccctaccttccttctcctcctccccccagcttccctgagcagccactgctcctgcccacccctctcccccctccctgcccacctctggttccaggttgagctcatggctcctcatacacctgctttgggacgggcaggagctcttcctcactggccagagctgtctgtccgctctgtgggcagtgcctacaattagagctttcagaacacacagccgctgcacagtggctggtccaacgacgacactgccctcctgaattgcctggtccagcgacaacacctgccctgcttctgtggccttcccacatgctggtccaagcaagctggatgcagggaccccctgcacttccacggcccccttgaggtggcctcttcaattgtccctacgttaccaaagagataacacaggtgcggagaggccgagcgacttgccgaagctcacagtcagtactgggattccaacccaggccatctggctttagggtctgcaccccggcctcctgctggcctcagatgtagttttgggctgacgtgccctcactgggacagcctcctgggagatcccaggtctactttcctgaactctttcctggagccatgggtgtctgccacccaccctgctgacggctctccctcagaccaccctgcagatccaaccctcgatggtttcaagggcctgtttccctaggcagactgaagtcccccaaggaaggattccctctcctcctcctcctctccttgctcttcccaagcccctgggcagtgcaagaccctggtccttctggcctacatgaagcccctccatgggccagttctgtgccaggaactagaaggttccaagctggatggatatttgggctgagcaagcagctggtaaacacagggaggggagaagagcaaagtcccccgaggccccgtgagggcagcctgctgacctctgacctctgacccactcacagaaccccacccccgctccctgcggcacagcccatgaggctctctgcttaggaaggggacagagaggtggcaaggccagcggttcccgcatggtatagactggcctctgccctttggttcaggccccaccttggtgagaagcccctgcctgtggtgtcgcagagcaaatgccattggcagagccaaatccacattcttttgtgagtggagaggccagccgtgctgcggtccctgctggagcccctgtgacacggggttatcgtttctctgacttggcagctggccgaaacggggctcttctgctgataaagtgatgtccactcgtgggttccacaccctcgtgggtgcctcaccctcccgtggcaaaccaaagacctctttgggaagaggacacccctgctcctgcacttgggctcatggtttccccctggacttgttaaaatcgaggcctcctgtggagattatctggggtcacagcagagcggggggcgtgtggtgagctgggtgaatccctgaagggccacgggtgtccactcagccgtgcgtgggggcgtttgtttaactccagattctggagctccaccctcagagactgttcagtctggggtgaggcctccaaatctgtggcttccaccagccattgctggcagctctgatgcaggcggccccagagtgcccggagaaatgtcagcttagagccacttggcccagggctgatgtggagggtcagggttccccaccgcagccagggctcagcccgaacctggtgtcctggcctggggcaggggctggaatttgtcccccgttggtgcaggggaagaggccgtgggcctcggcaggagcctagcagaggctctgagactaagccagctttgccttttctgtctcctcctcacttttctaacaaaacaggcccaggcttccacagggtcaagcggtctcaagccggcggctctccctggtggattcctgcaggtgagttcactctgagagctcagccagggccagcaggcctgtctctcccggagccaggggccaggccgggtcagctggacgcccggggctctggtgacacagccctgcggccgagtgcacacgctcacacacatctgtccaacctcactggctttccctttggatttgctaatgcagcaagattaatcaggtctaactcattaatttgcacagcccctccctcccacctgcgcccgctggagagcgctggttgtgggaacccagtaatcaccgaggctgaattagattcctactccacatcctggcccttgcctctgctgctcctgaaattgctgcttcaaaggaaacaaaaactctggattcaaagtccagtgagaccagatttgggggcacagcttttctgtggcctgagccgccctagggggcttgcgggtaggttgggggacactaccaggcccttgcagacaccagcccccgccccccaccctgggggacacaaccaggcccttgcagacaccagcccctgccccccaccctccccatgtcaccaccaactccaggctgccactggctacggtgcaaagcagctcccctgggagcacggctctgggggtgatttttctctctccctcactgctgtctacctgcccatggtaaccgagggtttgtagtaaaggtgagcattgcggggcaccagctgagcctgagccgcacccaaggagatggctgtgggaggcaggaggcatccagccccaggtcccagtgctgggacgcgctgtgggctcagcccatggacagggggccctgcctgtgctcccatcccccccaagggcctccccctcctgcagctgggcctcgcccatccctaccgtgctctgtggaaactctgtcccacccagcacccctgagagaaaggggaagcccggggaagggcagcactcccccacctgctctgcccgactgtcttcctggcactcttcacaccaaacgtcatgcgtctgctctctgctggcctcccctgtcccccacctgccaacagtgccagtccttgagggcaggtctgggcttggcaggcgaagcctggctcttgggccacagtgaccacgtggacagatggacggatgcctgtccaagggctaagggagggttggcccagagcaggcctgtcaccagcggccacctcacccctccctggagtgaggacccatgtctgcaaggagtcacggggcccaggagaggactgaggagggttcaggacaggtgggagcagaaacgctggggccccggagactcaatgctgtcagttctcaccacattgacttccctgtcatccaccaggacgggcggagagtaactctgtcctgtagcctccgtgagtctgggaaggcctcctcgccctcccgtggacccgggggtcatgctcaccgcctggtggcccccaagcacccctccctgccagccctgccatggggccccccctggagacagagtgcacccggccctgcgggagtcccggctgctgttccttctggggctatcaggagagtcgggcctgggctcagcccctctgtggggccaagtcactcgcaccccttctgtggggcctgagccccatgctttgctgctcacctgagtctggcctgcgtccctccgaccccgttcctctgaggcgggaaaacgaagaggccacacaagtgagcagtgtcacctgccccttcacagacatgagcaccccatggatgagagtggcctcctggagcctcaccagagcccaggtgctccccactgcatccccaggcctggctccctgcccccggctgtgctctcaactccctgccctcggctgcgctcccagctccctgccctctcctggtgctccctgccctctcctagtgctccctgccctctcctggtgctccctgccctctcctagtgctccctgccctctcctagtgctccctgccctctcctggtgctccctgccctctcctggtgctccctgccctctcctggtgctctgccttgcagggaacagagagtgctttccctcgggctgagagaagagatctttgagcccctgtctttgtccgttttgttcagcacaggttttgaagaccgttaagtgtaagagaaacatgggaatcgggcccggattgccaaaggggcaacatgttctcctcacaccccctctttccccacctgcagctgcttccatcccgggccctgctgaagctgcctttgctgaaaagatgtagggcacagccgctggggtgatagtgggagacggaaaggttggctgagaggcctgattccttccacgcatcacaacctgaaaatcgccaaaggtcttccttgttggggaggagtgaatggcagcaccggaagccaaggcccctcaccaccaagaagccagcagctcatccccaccttctggaccaaagacacgaagcagagaccaagccgagccaaggtcaggacctggggccacagtcaaggtcggggcctggggtcgcggtcaaggtcggggcctggggtcccggtcaaggtcggggcctggggtcacggtcaaggtcagagcctggggccacagtggatttcctcctgtggggatgtccttgacgtccacagctcaggcctgagggtctgccaccggctccagcagctgccacaggtgtcctggctcacagggtgtctctggctcagggccggggctgtctgcaactcccctctcccctgagccctctgagtggggctcctcaagctctcaggggctccgccacacctgggcttcctgggggctgggtcctgccctgtgacgcctgccaggctctttgtagacagttactgatctcccattggctccggttttgtggctctaagtgcttctggccctccctccacactccctgcctctctgctgagtagttaattcactataagcacgctccagaggaagtctccagcctcttagtgaaactgcagcgatgaatgagaatgatcgggcacccaggtctgcctccaagtctcgcggatggcccagagaccgtgcagtgggaaggttggcagcaagctgaaggtttgaactctggctgtgcccctgctgccaggggacctcaggcaaatcatctttttctctgggccttggtttcctcagctgtggggacagtgctggccccgagtcactgggccgttgtgaggatggagagggggtcgtgcaggctcctgggtcctcgctgaagccacccaggagttctcctgcactctcaggggagcccttgtgctgacatctgagggtcacggttcagtggcttcagggtccagacaggcccggaggccaggccagatgtggtgcagccaggggagggggcaagccccgggggccgtgggccatcggttcacaccacatcaggggccgggaatcccactcagggtttagccctaggctccccccagcacccccctcccaatccagaggacactcccagccctgagcagcgagctctgggcaggcatcgggagagggagcgcatctcggctctttgtgaggaattacgtcccgacaggtcactgacacagaaaagccctttgtcccagccagctggccgcctgctaatgacatccagcctgcaccttccaaggccacctctgcatccagaaaggacagtggcggctccagccggggaggaacaagggccacagcttccctggggtcaggggtggggagggtgggtgaaggctccggacgcttctgcacgttgccccagagctgcggacggacctcaggtgaccgtcaagacctgctgcggatccagtgacccctccaaggagagtgccgagtcctgggaattctcttcctcctcctgcacctccaggtcaccttgccctctcccgtgttccccagccagacccccagtagagaggagacccctgcagttgtggatgtggctttccccagtgtccacgagacccctggagcctggcccctctgggcccgtagaagctcccatgagattctgatgcacagcgagggcctgagccctgggccagctcttgggggcagccctgggctcccatgtaggtttcatcacaccacactgtggccctcacaccctgccctctggctgcccctcctccctagggcatgtaccccgagcccacctcagcctccccgggcatatcagggccccactttctggggtatgtgtgagccacgggacctcgagtcaggagatccaggcctaggcctgattctgccccctccaggttcaggaccctgggcaagtcctcccacccatcttagcccagcctccccacccataaaatttgggttgcttgtcccggctctgaggctttgagagcagggctgtctctaaccgagggagggtgctgcaaactccagaaggcccccgtcccagggaacagcggggggaactgtcagagaagcgacccctggaccagcaccctgagtgggctttcttctcctccccaccctgctgagaccacccaaaccttgttaagatcaaagattccctggggagccacacgggccatgctggacactccctgccagactttccggaacaattcctggggacccgtgtcccacaaacaccagctggaaaaggcagcaacgtggggtctccctccccctcagccaaagtgaactgtgtcagcaggtgtctcccagctgctgagaatgagccaagggaccaagatggccgcctggctcctgcaagtggagagggtcttgctggggcctgaactggctgaggtcttgcagcaggtgaggaagccctggacagtcctggcctctccaccaaagcagaatggctgcaggcctggaggcacaaagcagggatcattttcctgtgtgtacacgggatgtgtgtacatgggatgtgtgtgtgtgggatgcgtgtacgtgggatatgtgtctgtgggatgtgtgtacgtgggatgtgtgtgtgcaggatgtgtgtgtgtgtgagatgtatgtgtgcagggtgtgggtgcaccaggcttgtagatgcatgcacagggtacgtgtgcacagacgtgtgtgtgtgcatggactgtttcatgagatgtatatgtatacagggtgtgtgtgtgcaggtggtacatgcttcatgagatgtgccgtgtgtatgtgcgcacaggatgtgtgtgcagtgtgtatgtgtgcatggggcgtgtgtacacagggcttgtatatgcacaaacagggtgtgtgcacgtgtgcatggggcatgtgtgtgcacaggagcatgttttcacaagcatgagtgtgacagtcacctgctgacaggcggcctcaccctctgctcaccctgcccacccggacccagggcctctctcatttaccccaacatcccctgcccagctcttctgcctgggagggtcctgtgcagaggggggtggcccacacgtccgcagcctcagcctctccatgttgttatccctggatctgggggtgggacccccacagcactgcctttttcagcctgtggttatggggactcaggtccccaggcccaggggctaatttcagagggagaggtttcctttgccaggcaattggattttcacatcagcacattcctctgaaagtgggggcagagggtgggcttcatccccacagccgctaggggtccttgggcatcctcaggctctgcctcccagcaccgggtaccccaggcttctgaggccgggtggggaacttgcagcctgcaactcgggcacctcttgtaatgtcgggaaaccggggcaccgctcagtcacacgtggccgagtgcaggacacctgaacgcctgctgccaggcctgccctcccggggcagtgtcaatgccgagtctgggaccctgcccgcctgctgagcggtgcacccagttctccaggagctcagttcttcctccacgcagtgcctcctcccacctgtccctcctcagccctgccctccccagcactcaagtcaagaccaagaccacacctcagccaacccctcctcattcccagccccacccaccctcctggactcgtgtggggccagcaccgccacaagtgtgccccacgccagagtcccctcatgccctggccccagctgggggcccacagcgagcctcccggcagcctggtctccttccttacaggaaggggacgctggacacttagccccctacagggagcccagagccaggcctgggtgaaggtgcctttgggaggaggtggaggagtgtaacgattgggacccagctggacaggtccctgtgagccggcctgggtccttggtgggtgggtgagtgccagcttgccctcacgggactttgccccctgagcaggagggacagctcaggccccacctgccttgggcttctgagcatagctttggggggcaggggtcgtttgcagcacgaagcccttgtcagcttccagcgtgttctaacatttgtcataccagatggattgtcacgagcatatggggtgacattattattctgttactcccatgatgacagagccaagggctggggagacggacccatttcagcctgacccagcccagggcccttctctaccctcacagcttcttgatgccccattccccaaacccgggcccccaatgcccccgccccacccccgggagaagagcccagccgcgccggagggtggagagttctgtcaaccagtgccgtttccttatcaacaaggacatgtctacaaatagctcatcacgtctccaatccagaagtgctgtgtcgtttcaaaaatgagcggagccaacgcagccaccagccaggcctcggctacctgggcaaggctgccggctcatgaatattcacggctccgatggtgtctctgagcctcctaaccatctggaattaaaccaacgagcttcccctcatgggctgcactcacttgactttcagctcctctccaaatcgttctcttcctcgcagcagatgggggtgtggggcggcctcgaccctcctctgtgtctgggctgttgtggcaccagcacctttgccccagttccccgtctcttaagcgctcaacatgcgtctgccccgttctcagggaggcctggaccctgtcccagccctggtggggataattaccctgacgctcgtttgcagcgtttaatttgcttcctccgcgctggaagcccacgtttggtgatgtatgtgttatgatggccacgtgtccttcccccatcagcgacggggtctggggaggccggggaggctcctcattacgctcccagcacaaagcccaatcacagacatcgcacacggatacactagaccctgcctgcggggagagtggctgccagccggggcacccagacgtccctgcgtgccctgtgctggcgcaaggcagctcttccgtgcctccgtggtgcctgcggtgaggctgcctgggacccccctgtagatgctgccaccagggtctgctccaaggaacggggagaatgggcttgtggtgctggggccttgtgtggggtgagacgcttcagaccggaagggtgggtggcctggagctgctctgtctccaggcactgaccacagcatgcacctctgataggtccaggagaagtgtggcagggttgggcgcagccacctatgagcccctgaacctccccaggccgtcggatctcacttcagagtggcctgggcatggcctcaggttaggtcaggtgaagactctattcctggctcaggaaaaccaccaggacaggtgagcccagcagcatctcgtggagggaggctctgagtcccgtgaggacaaggacggaacaccggggctgccacaggtcgcagagaccctgtgtcaacacccttgttttgaggtgcagagaccaaagttgagacctggccatgcagcaggtctgcagggacctcagagcccagggccactgtcctgtccccagccccattaaacgcccagggccactgtcctgtccccagccccattaaacgcccagggccactgtcctgtccccagccccattaaacgcccagggccactgtcctgtccccagccccattaaacgcccagggccactgtcctgtccccagccccattaaacgcccagggccactgtcctgtccccagccccattaaatgcccagggccactgtcctgtccccagccccattaaacgcccagggccactgtcctgtccccagccccattaaacgcccagggccactgtcctgtccccagccccattaaacgcccagggccactgtcctgtccccagccccattaaacgcccagggccactgtcctgtccccagccccattaaacgcccagggccactggcctgtccccagccccattaaatgcccagggccactgtcctgtccccagtctcattaaacgcagcaaacgtcttctggacgtgccgccagtcccacagaaaaccaaagcaaggcagactcaccgctcctgcatcccggagctcaggtccaggagggtctcgggaaaggatgggggcaactggagtaccatcctaaagccgtctcagccccagggggccgcaggggtctaccctgtcttctctcttgcaggtgtgtggttggttctagaagatgctgagcccccccccgcgcactcgtccccacctgcctggccccagcacatctggctgattctcattcaggccttgaatgaaaggccatcttcccaagagtcctccctgactcccctctcacgggacaggtccctcctgttccccgccatggagactgttggttaactctcgccccagccgactgaagggcccaggagggccgcacctgccttggccactccagacccgccacccagtgcagacccaccacctagggcagcgcctccacccagggcagacctattacccagggcagagcctcgggcatggctgaaggcaggaagggctgaggatgagcgtgggtggtgagaaaaggcctctggacggcaaggacttagacgtggttccaggtgtgcacacgggcaacagctgggggccttgggcccccgcaggcctgatggaggaaccccgctttggttaaggcttaaaggaggcgcacgggactgactcttcctatggaaaatcctgcacagggagatcaaatcccagcctcccagagggaagccccgtgccggctgtgagctgcccgcagctgcctgaccctaatcttctccaatgaagtggctctgagaggttttgtggtcagtatcagttctgtctttgatttcagcgcctggtctggacagcaggaggaagagctcagagacagcttcctccagtgtctcggggtgcagccgggaggagctgcctcgcccctgcctctgcctctgactccctgccccgccgcctggctctcacctgcagcccaagagtccaggcctgggccctagagtcgctctggcccacgggaggggcacacccgggtcccgcccagcaccactaaaagagcctgttcagagacgtgggccgtcgcccctgctcctgctggaacgtgcagcccagagcccccacaagcacctcgtgctgcctccctctttgtgatcccccagcccagccctcagttgtaccccaggggaaactgagtccctgcctggtaaatgtgcagcaacacagccacagcaggctcagctcggcacaggcacagccagggtgggctcggtccagcctcggcgcctccccgggttctggtgctcaggcagtttcctccacctacatgagccccgactttctcatccgtagagtgggacgaacaacgcccagtgctcagtgtgatattagaagagcccaagacagtggagggctcagcacagatgccgccatccgtccgcagaatcgcgctgagagcagctccttcaagggagcccgggacgtcccggggaagccaccctcagtgactggccccagacaaaggctgaacgggccgggctgggctgagggacactgccggggactcgggtaggaagaagcccagggctgaaggtcaaggccactgcaacgccccgggctcaggggagagtggggacacaggacccatcctcctcacctcaggctggtccttttcgctcccatgtgaaggcaccattgccaggccaatgctggtcactctgtgatgaccaggttggagaaaagctgagaaccccaagtattgggcaaatgcagactcttgtgtcttcaaaccagaggacatttaaccctaagtcaagaggccggcttcttccaggagtcccctccctgggcattgcctggaaatgaggggccgatggattgtcaggccacacacctgaggggaagggagcagtcggggcaacaccctggcaggacactggctcgggatggagggaggagggtctcagagtagcaggctcaggcagacagctcactcatccctgcctccagcgccctcgccccttacgcatcaaacttccggttaatgaacaacctccacactggggaaactgctaattaaggtggctgcactttggcttctggcttagttagctgcaacacccccagtgcccgcaggaactcttttctctctcccacagagacgcctgggaggctgagcccaggcagtcaccatggtcgggtcctgtatctccttcggactccggaggcatgggcggcgttccacctcccaccaggctgatggggcagagatacttcccctcaaagagatgcacgattttaacaggctctctgtgcaagccatactggctggatgcaacctctagggaggaggtgggcaggtggggggcagtcagggccccaccacctccctgcgcccctggagacagctcccaggctcccccactccctgcacccctagagacagtgcccagcgtctcaccagaggtgccatctcagcagcacatgacaagggcataaggtcacggcttccctagcccccaggatgcgtcccagggttggacagggctcaccctcacctaaggtttgggactcacctggtgtccactctggagtcagctgacccggcccagccctgaggtctctcctccacctgtctggctccaggacagtgatgggcattgcaggccgctctgtcaggtggcgtttctaaccttgttctatccacagaactcgtcttcaaaaaaagtttacatgacagaaccatttagaagaaaaaaagcagagaggccttggttgaggttttggtggctctgagtcagatccaccggcctgaactccaccagccctgcaccccagcagccctgtaccccatcagccctgcaccccaccagccctgcaccccatcagccctgtaccccatcagccctgcaccccacttcccaccagcattgcaccccaccggccaccagctctgcaccccacccctaccatccctgcatcccagcagccctgcaccccatcagtcgtgcaccccatcaaccctgcaccccaccagccctataccccatcagccctgtaccccatcagccctctaccccatcagccttgtaccccatcagccctataccccagcagccctgcaccccaccccccatgagccctgcaccccacaccccaccagctctgcaccccacaccccaccagctctgcaccccacaatccctgaaccccaccatccctgcaccccagcagccctgtatcccaccagcactgtaccccaccgcctaccacctctgcacccccaacccgccctatgccccaccacccttgcacccccaccaaccctgcaaccccatcacccctgtatcctccagtcagccctgtatcccaccccaccacccccacacccccaccagccctgtacccccaccagtcccacaccccccaccagccctgcactccagccccagccccctgcgcagactccgaggcatttcccaggaaccccagattccaggaagcaccgttcagaaactgcccgctctgctcatgtccgtaactcagatcttttgttaattttctcagcaacaagtgataactcaaccatttttggggagaagatactcccaggttcactgatttttctcttcgtacacttttcttttaatgattttttaattccgtgggtaaaacacgaataggttttccttggaaaagagttcaaagcagccagacaaagggaacttcccatgacggctgcccagtccctgctgcagaggaagccgggggtgcccggggatgcccctccctcctcactgctttcccacaccagagtgggggtgttgaggtcggggggagcccaggagcggaggtatgaggtgcggttccccaccctgaaagtacacaagggcctgcatgggagctgctggcctttgcaggctcgtcggcaccagcttgggtcagcagtctgggcagaggccacacagcctggacccctcaggacagtttccctggaagagaggttcctgttttcacccttgactcacagttcagaggccaagcaaacaaagtgcctgtggcaggtgcatcagcagctcacatccagggtgcccctgcctgggctcggtgccaaggcctctgggagacccctctccgtgcagcccccagggtcacggtctacaggctgtcaggcgcctgctctgaggacacctcaacctggggatgccaggggcacagctctgcccccagccactctggtagaagggccgctgaggagctccaccaggggaaagcccctcgccgtggacctccccgacctgggtgggctggcgagtggctttgcctgggagaaataaaggctctgggtgtagacacagcaggggagctggtggacccaccgcagagcccccgggcgaccaccggggccgaggacctgggttcccccgccatccctccttggggggtggggacagagggagcccccatttggctcatctggggagctcagttctttggcccttggtctggggtgacagccgggggcacccaggcccctccagctcggagctgcaccagggacgggtgcgtccggagggagcatcagcagccagtcacggtagtggcttcgcctctgcacatccagatcagggagaagagggaaaggcttccatcccacggttggctttgccgagacgtttctaaataaacgagctttgcggggcggcaggttgatgcatctggagtgtggggtctcctccagcttccggagcacacgcctcccaccgcaccgccacctccccggctctgagaggaaaactcattcatctttcaacacttcatccccggcgagaccctccgggcccatcccccaccccgaatagcctgtgtgtgtttccatagcaacctgcacgtgcctctgtgggtcacatttcatgaggccgtgagctctttgaaggcacggccttgacttgaatcattcacagggtgcagagtggacgggtgaaccatgaccctaagccagcctggggggcaggtgagccagctccctcccatgccattctctggaccatagctcatgcaccccgattgcgtcttaccgtcatttgacagacagaggccaaggcccacagaaagggggccctccccttcagcagcagggagacggcggtcatgctggcccgagacaggacgcccctcctggggagacggagctctgcagacgggaaaagccagctgcccccctgcacaccggggtgcggggcagccctgcttccttggaacaaaggctgcacttgcagaagtagctcagactttcacctgcttcaaaccctgggccgtcttctggtctcaaggccaggaggcagggcccaccgtctgctccctcctgctggatggagcctggggaagctgaggataatgggggcgtggggagggcttctgagcccccgtgctgagcagcaacaccaaccctcccagtgctggtgagaattccggagcagctggtttactccgtctggcaggcgtttccctcccaacagcaaagcatcccgggcttctagcatctaccttgtaaatatcaagggcattgcagggaagctgagctggcactggtgagctgacgtcagcaaagggtcagccccggggccgggggtgtgatggcacagctgtggcccagccctgggggcttcatcgctgctgagtacctcgcagtgcgggaatcgaaaaagcctcctccctcggcatcgagctgttcttgccccagagacatctgaacaacgagtattgtttcagatacacacaggcactatgtttcaatttttgatagtaaaaccattatttctgatgcccatttctcaccccacagaaattactggaatttatctgcattaggaaataaggaacggggaccgggcctggccagcctctattaccctgtgccttaattaattaattcattcattcttcatcaaactgtcactcctctcccaccaccttccagccaacacttggcaaagtgcaatgggacagccgtgccacgaggacgtcttctgggtgggctgtggggtcgcggggctctgacccgaagctgcacgcttgtaggagtggaagctgttaggagctgaagccagggggccttgctcaaggcctggcctcctctgtgtgacagagctatccaaggtgctgactttacctgctccccaggatgagcagctctgagggtcacccagggaagggagtgggggacagtctgaggtggaagacacagggagtgggggaagggggtgcgtgcacacaaaacagcaactccagcctcccaaaaccaccctccgctttgtgctccggggccccccattcacccccgctgcgtggtaccctcctttagggctgtgcctgcactgtgctgtgtccacactgaaatttgctcacagctggccctccacacggatctgctgttggatactctgtgttattccagcttcaattttcaaagaaaaggaggggcctttcttcatctgctcaaaaattagactcaaacccacacgtccagtgtccactcaggctccttctgcattttttccatgatctgttcccttgattgtgtcgaaggcagggggagggagaggccagcatgtaaccagactggatcacccaacggtgaaggtgatagcagcggcggcctgtctggaatgggctgccatgatgctggctgccgtcggggaggtgtagccggggctgtgcgctctgtggagctggtgggagctgggaacaggtggaagctccacccacttctgagttgacagggtgggggcccagctgtggctgcagacccaggcatctctgcactctcggaggtccaggaagcccctgcccccgctgcctggcctctccctgctcccagtgcctgctctgatttcagggcaaagttgaggctgagcccaggcactgtcacagcccgcctgggtgtactcacccttggggcagcactgacacaccagcctctgctgccctggccccccttcagactttgggcgctgacaagcatgggagggaggctgagggacactaagggcaggtcagtgtgggcctgcaggcagccttcagcacaaacagtctgggcaccgtgggcaccgtggagagcaggttaatggtggcagggggcagatgggctcctgggtggaaagcggggggtcccagtgaagcctcatcttcaggccagggctgccagttctgtggaccacagtgagaacttgtgatactttttctgggcccacccatgaccacccatggaccaatcggcatgcatgaccacccacggaccaatcagcatgcatgaccacccatggaccaatcagcatgcatgaccacccacggaccaatcagcatgcatgaccacccatggaccaatcagcatgcatgaccacccacggaccaatcagcatgcacttcctcccctctgaagcccataaaaacccagactcagccagactccagatgacaatgggtcacctgcttgcttagaggagtgacccactgcgggtcgcctctgagctgttcagtgaagctccccttcacccggtcacccccccacgtgtccacgtacctcattcttcctggtgtggaacaagaatgtggggcccaaatggcagggctgaaagagccatgacagacagggttgagacaccccccttgctcgccatgctgtgggtgatgagagggagagaagagaggagagaagagctgcggcccttcggggagcccagaccaaggagctcctagagccagggctgtgacgccatctttggggctctgcagttcctggtacctccaagcttccaggcaccaccacgttccctggtgccagctgtggaagccacttgtggtctgcctggtccagcgccagcctcacagggagccggcatgtggagctgtcctccctgccgcagccggcatgcctggctgtgcatagtgcctggaccccacgctcactcgctcacacaccgctctgcgcctggctagccctcggcaggtgtggggtccacgcgggtagcatgagccaagcccaacctcctgggccgagtgggcggaatgagcccagagggccccagcaaaccttggcaaaggtgccaccggccacagaggcttccagcaggaaaagcaacagcccaagggtcccgtgacaaagggagaagccttccagcagaggcgggagggaggcgcccaaaggcggagggatcccaccctcccacccaaaggccgaggcctgggtgctgccccctgtggcaccctaaaagcccctatgatgttgccttctcccaagacgagatcattcaactgccaagatgagctttctcagcctcccccagccccctcagcctcctacactagccccctcagcctccagaacctgctcattccaactccagggccggctccccagcctcacaggcacctggcctctgcggtgtgcccagccctgcaccagaggtagctctgcctgtgctgaagacctctgccttctgggagaaggaggttaaaataggagctcatgggaaccgaagcctggtggccgcttgggtgtgaaatgccattctcacgggttccccagagctaggggcaacatcatgtgagtctgggggtccccctcattcccctggtgtcccgacttccatcagaggagaaagaaaagtagggaggcacagatgtgaactcaggatccaaggtctgccactgccctcacgcagagggccgctttggctcggagaaagagaagggtatgacaggcaccgtccctcacctcctgtgtggctcgggggcccttgtggcctgcaggcccttcctcctgctctcaggctgtgctggtaaccgcgctcctgcctgtgtatatttttggctggggagttggcgaaggggctgtttgtctccgaggccactcctgcctcctcttgagtcagggcggagacggagccttcccaggcagaggggagcgtggagggggcttcaggagtgtggggccgaccgctttccctacagggcgcttgacctgtccagagggaccagggaagacggcggctccgggggagggaactgggaacccgagacccagaaggtgcagtgactgctctgctgggcccggactcaacactgtttacctgaaatccgtttccagttcaggaggaaacagactccgtggcaagatggtttttccactggcctctggatgctcggccttccctgataccgcagctgcagtcgccgttaaccgcaggctggagggagaccctgaccccagctccaagcccccagtgcagagccggagagccgggccccagaagctgtccctgcagcaccacctgctgggcggtgctggaagtgtcgcagcaccagcgggggctgggggcgctgccgctgggtggtgaggaccccggggtcacgcatcaggttatgaactctgactctgccatttggtcctgaccatagtctcgtcatctgtaaaatggggtcaccagcacccccaggtgtaaggaccccatctaggtccatgctggggacggtgtcgatggagagagctgggggcggggaggtggaaagagaggatgataaaccagaaaaggggggactttctgtccttatcaagatgggggtggtccatctggggacctagactctttcatggctggctcaagtccccagtggtcctggccctacagcctctggagtagggtgaactccttcgggtggcatcagggcagagggcctgggcaggaccaggaatctccccacccattttacccccagggaggtcttggccaacccgctgaaggggttggtaatctccccaacccgtgtccatgaggggttctgaggaccccctagacccatgtgtgggtaaacccttctgcacctggtgccagctggaccccagcccccgccccaccatccctgtgtggactgtcaccagccccacccctcccacaagcaggtctcaccctccctggcccagtctccctccttcccttagggctggggctgtaccccattgggtttctcctggccaatggcagacctggtcctcagctgcccagaatagcgctgggaacccttcctcctggcgctggcagcaagcaggcgagaggcaggactcagcccggggctctccccacctgactggccagcgggtttccacagcactacctgtccgtccacacagggcatctgacttggaaaggcttctctcggctgattttttttttttttttattttgagatcaagttcactctgtagcccaggatggagggcaatggtgcaatctcagctcactgcagcctccatctcccaggttcaagtgattctcctgcctcagcctcccaagtagctgggactgcaggcacccgccaccgcgcctggctaattttttgcatgtttagtcaaaacagggtttcaccacgttggccaggctggtctgaaactcctgacctcaagtgatccgcccgcctcggtctcccaaagtgctgggatgacaggtgtgagccaccacgcccagcctgaatattttttttaaaggcacaaaaaatatttaccaggccatttcttgcctccggaacctgaagaaaataaaattcactttcacatcctcagcagccaagtggccccttcagatccacctgctgaggtcatggccagccctgcccccagcagtttcccaggatgcgtggctggggggtgtccgatcacaaaccgcgggaactttattttcaaggctgctgcctggcccgggggcttcggttccaccacatgggccagtttatcaccagccagctctgcctcgcttctttttattgtgttttgtttccttagcagtaaaatcattgacttacttgtctgggtttttttaattgcaaaacgaatgcatgatgcctgtaaccatgtcaaataaagagttatgcacagaattagaatgagaaagtctctgtctcacacctcccctcgcaccacctgctggggttggaggtgggaaaggtgctcccaccgactccggcagccaggatcactcaggggactgggatgcggagagagctcggggatagggcctaggagtcactgggccccaccaaccacccaggcacctgtccgagcctcagcgtccttgcagtgctgggcctgagtcggcctcctggcggctgggagctggggagcctggctccccaggatggtcaggactttttgggagcaggaagacaatagcccaggaaagctcactgggccttcatcctcacggaccactacaggcagggcccacagccgagaggtgcagagaagagcaagccagtgccgcccaggctgcaaccctgaccccactccatgcaccgtcctcccccagtgtccaaaccccccaaaactcacagaggctacatcgtaggcaccaccatggaaaggaggcctgtttccagggaaccctctaccgccacccccccaaccccaaccccaacctcacccccactcctttcgtcacctccaccccccaccacccatccctacactctcggtggctctcagtggcagccacatcaagaacaaacccactgggtctccgggataccccgtaacaggtggaattctgagaggtgggtggggtgggcattctggggctgaacttggatgagcgaaggcccggggcagggagatagaggcggccatgtgcgggacaaggatgtcaccgtgattcagaaaggctttggggccgacatgcagtaatagggccagggtcacctcctgcctggacaacaacagacggaatatctgcagccacagtgttagaggcctgggacgtcggcagcagagctccacagcccccaagaggacgagccctccagctgctgcagcttcttcctggtgcagtcctgggttgacgggaccgacctcggagtctgaggaagccaaggtgcctggtagagagggagagaagggagctgctccgacacggagcctctgggatctcctctgcacaccctgggcggacgcggcccaggccaggaaaaggcccatctagaggagtccgaggagcaaccccgtgttcccacagggccgggagagggcctctttcccagccagcctggaaaacctcgaaatccatgggattgttgggggagaactcagaagggagacgctgggcagtctcagctggggaataattaggatgaacaaacctgaaacacaaaaacccctaaaatcaaattattgtgagtaacacatcaccccataacaaatgtcaaaaaccaggactaaccaaattattgtgaattaaaattcacaacttatggcattaaatcaaagattaccaggcatgcacagaaatagaaaaacgtggcccccaaatcaattgattgaaactgaccccaaactgatgtagatgtagaggtaatagacaaggatatttcaaatgttatcagaggttgggtgtggtggctcatccctgtaatcccagcactttgggaggccaaggtgggtggatcacttgaggtcacaagttagagactagcctgcccaacatcgcaaaaccctgtctctactaaaaatacaaaaaattagccaggtatggtggcaggcgcctgtgatcccagctactcaggaggctgaggcaggagaatcgcttgaacccgggaggcaaaggttggagtgagccaacatcacaccactgcactccagcctgggcaacaaagtgagactccgtctcaaaacaacaaaaaaaagttatcagaactgtgtttaatttatgcaaaaagttaagtagagacatggaaaatatagaaaagatccaaatataaagtataacttccagagacgaaaaccaaggtacctgagacacgaacacactgtgcaggatcgatggcagatggaagctgcagaagaaaagaggagggaagttccagcaatagaaaaggtccacagtgaaacacggggacaaaagaatttttaagaaattaaaagaccatcaatgatcagtgagacaacataaagtgggcaaatatatatgtaattgctgtgcccaaaggaggagagacagaaaaaatatttgaaaaaacatgtccccaaatattccaaattttatgaaaacaacaagcccacaaagccaagttcaatcaccccaagtacaagacacagatgatgaaaaccacgcagagatgcatcatcattaaattgttcaaaattagtggaaaagggaaatctggcaaagtcaggaaaggtaatcaataaagcagccaggaaaaaaaaatagacactttagacagaggagaataaaggacaacagcaggttcatcctcagaaacaacgtgagcagaaaggttttggagcaatagccttaaaagtcgacctagaattctatacccagcaaaactatccttcacaaacgaagacaagccttccagcctgggctcaatgaagagagttgaaaagaccatcacgcccatgcttacaatgaaggaaacatgggaaagcctggaaatgcgcaccttctggaacttatcagaaagctcagctctcagccaaccactcattccaaatctgtggagatacagtgaccaggctctggatgcaagacacaggacccgagcctttggttgcctggcacacactgctggatgctgaataagccaggaagaagatccggctaaatgttggcacattctaaagtctacgtgaggccagtctgaccctgggaacctccatgaagacatgggcgtggagggtctgccttttgcagggcccaccaggggctcacaggaaaggtcgtggaaaattacaagaaatcttccctctggcactagcgggtgaggggaatggaagccaccgccagacagcaccatctcctcaccctcctgtgaagcacaagactcacttgcagagggaagagcgcagaaaccgtcaccccaggacgctgcggttgaacgagaggaagcgagaatggagaagccctggccctggggaacaggatggaaaacgcttggctcagctccgtggctgcgaaggaaccggcgcgctcgcggaggccacaccccgagacccgaggacacagtgcctgcctgagatggagccagaaacattctccaccctttcacgcaagactaacaagggctccatgaaaataaaactggaagagctgaaagagaagcattctccctgggtgtgaaaccaagaaaagacacaaagccaaggaaaagccattgagaaaacacctggcacacggcctatcccctaaacacagaagataaccatagaaacaacctcaaaccaagtccaagtcctgacttcattgataaaacctccacaccaaagacctagagaaggaagggcaggtcatcaccaagcataaagccgctcatggcaatatctactttcctccacaaaatgcctgccttcctgtaaaaaattataagacatgtgaaaagcaggaacaaacacactcccaagaggcaaaataatcatctaaaccagaattgggcatgacactgatgttgggactatcaggcagggaacttaaataaccttgagtagtatgttaagggctctaacggaaaacgtagacgatgtacaagatgagatgagtaatttcctcagggagatggaaacgataagaaagaaccagatggaaagacgtcaaaccaggctacagagatgaaaaatgcttttgatggggcagtagacgcaacacagtggaggaaagggtcagtgaacatgagaatagatcaatacctaataaccaacacacacacatgcacgcacgtgcacgcccacacacgcacacccacacatgcacaaacatgcactcacatgcacaccacacatgcacaaacttgtgcacacacatgcacacgcacatgcacacccgcacacgcacgtgcatgcccacacacgcacacacatatgcacacacaggcacacacatgcacacccacacacgcacatatatgcacatgcatgtgcacgcccacacacatgcatacacacatgcacgcccacacacgcatatatgcacatgcatgtgcatgcccacacatgcacatgcacacatatccacacacccacatatatgtgcatgtccacacacaaatacatatgtgcatgcacacacaagtacacaccatgcacgtgcacgcccacacatgcacacacgtacgtacgcacacacatgcacgcacatgtacaaacgtgcacaaacatacatatgcatgcatatgcacagtcacaggtgcacgtgcaagacccgatgcgcatacatgcacacgtgcacaaacaggcacacacacgcacgtgcacacacccacccacacatgtatgcacatacaagcacaaacacgtgcatgcccacacacacatgcacacacacgtacacacacacacgcgcacacacacgcccccacacacacatatgcacatgcacgtgcatgcccacacacgcaaacacgctaatcacacacatgcacaagcacatacgtgcccacacacatacacaggcgcatgcacacacacacacatacacgtgcacacacgtgcatgcccacacacacacacacacgcacatgtacacacagcagggaggggaaggcagagcatccaagaacagaaggaaaagagaaaatagggaagagccatttggagaataatggctgtatctttttcaaaattaatgacaagcactaagccacacatctaaaaaacttaacactaagtagggcaaataccaaaaataactgcccctaggcatatcaaattcaaacttttgaaaactaaaggcaaaggtagccctggcgcagtggctcacacctgtaatcccagcactttgggaggccgaggagggtggatcacttgaggtcaggagttcgagaccagcctgcccaacatggcaaaaccccatctactaaaaagacaaaaattagcctgatgtggtggtgcacgcctgtaatcccagctactcaggaggctgaggcacgagaattgcttgaacccaggaggcagaggctgcagtgagctgagatttcaccactgcactccagcctgggtgacagagccagactccatctcaaaaaaagaaaaaaagaaagccaaaggcaaagtagaactcctggaggcatccattggcctgggagtgcgggtgtggtggggacacaatatctatagaggaacaggatctaagaatcacagctgacttcttgtcataaatcactcaaggaagcagacaatggagtaacacctttaaattactgagaaacaaaacaaaactgtcaacccagaattcattcgccagtaaaactatccaccaaatctgaaggattcagtctttctctggcaaacaaaacccgagggaacgcgtggccctcagatctactcgacaagaaatgctgaaggaattcttcgggcagaggcagcagcttggctctacacaaagcaatgaagagtgttggaaattgagtaaaataattcaaaataaagtttactttttcttacttttacttgctctaaaatataattaactgtctaaagcaaaaaacagaagcaaagtattttgtgtttatagcacctataaatgtaaaatatgcaataattcccaatattgcaaaggatgtgaaggaggacctgagactgttcaattactccaagagaagattaaaaaaaaaaaaagaggcaagaagaaaccgagccaaatggaacaaatacaaaatagctagcaagatggtggattttaatccaaccatatcaataatcactataaatgtgagtgaactaaaagcaccagttaaaaatagattgtcggattggattttaggaaacaatatctaactatggtgtgtgaaaaaaagtcaccttcagtataaagacaaagataggtaaaaagctgaaagatggaaaaagatacactatataaacactaagccaaagaaacctggagtaactctgttaacatcagaataagtagcttcagaacaaaggatattatcagggataaagaggaacacttacctcatgataaaaaggtcagttctccaagaagacataaccatcctaaatgtgtagtcagctcataacagagtctcaaaatacatgaagtaaacactgagagaattaaaaggagaacctgggaaatccacagttatagctggaaacgtcagcactcccccagcagtcactgatggaacacttaggtagaaaatcagtaacatcttggccaacatggtgaaaccccatctctattaaatacaaaaaattagccaggtgtggtggtgggcacctgtgatcccagctactcgggaggctgaggcaggggaatcgcttgaacccaggaggcagaggttgcagtgagctcagatggtgccactgcactccagcctggaagacagagcgagactcaaaaaaaaaaaaagaagaagaagaagaagaaaagaatatcagtcacaatacacatgaccttaacaacctcaactaattggaactaactgacatgtataaaacaaaataacacacagagacccagcagcaccttcctctcagatgcacatggagattcaccaagatagcctatattctgaccataaaacaaactttaaaatttaaaagaatagaaatcatacaaagtatggtcttagaacataaagaaattaaactagaattaaataacgatatgtgtgaagtctcacaaatatttggaaattgaatagcacactctaaaataatccatgaaagagcaagtctcaagaaaaatttgaaaatattttgaactgaaatgaaaatgtaaagaataacatcaaaatttgtggtaggtaggtaaagctgtgcttagaggaaaatttatagtattaaattattagaaaaagaagaaatatttcaaataagtaacccaaacttctacctaaagaaactaaagatgaagagaaaattaaacgtaaagaaagcagaaggaaggaagtaataaagattacagaaaaaatcaatgaaattgaaaacaaagtcaaccaaaccaaaatctggttctttgaaaaaataaaattgataaaccttagacagactgagcaataaaaaaaaaaagaaagaagaaggctggacaaggtggctcacgcctgtaatcccagcactgagggaggccaagacagggggatcacttgaggccaggagttcaagaccagcctgaccaacatggtgtaacctcgtctctactaaaaatacaaaaattagccggacgtggtggcaggcacctgtgaccgcagctactcgggaggctgaggcaggagaatcgcttggacccgggagacagaggttgcagtgagctgagatcacaccattgcactccagcctgggcaacagagtgagacggttgcaaaaagaagatgcaaattatatcaggaacaaaagagggggacctcactctcaatactagttattaaaggaacaataaaaaaatactagggacaactctacacccaggttcaacaacttaagtggactaattccttgaaagacacaaactaccaaaactcttccgaggtagtcctatgcctattaaataaattgaatttgtagttaaaagcctttcaaaaaagaaaattttaggctcctatggttccactggtaaattctaacaaacgtgtaaggaaagagtaacccactgggaagttcgaacagacatataaggaaggggtaatgccagtgttacacaatcaggttcaggaaagaggagtcgttgtgtatctgttgctgagtaacaaattgtgctaaaacatagtggcttaaaaataatgataaccatttatcgtctcagtttctgcagctcaggagtcggacggcacgcagccgatctccactcccaacgtgcagggcctctgccataagccttgaaggcactcattcactcacgcatcgggggctagtacaggctgtgacagaggcctgagctggaactgttgaccaggacacacacatggccatgtggcctctgggcttcctcacagcatggtgtctggattccaggagttggcatcctgagaaacaaccatgcagaagcagccctatggatcctggcctggccttggagtcaggcagtgtcactcctgtgccttctaacctgggcccccgggcccaaggggaggaaatggagaccccacctcccagtggagggaaggcaaggtcccactgtgggggtagcacatgggatacacccatgtggctgccgctggagacgttagtttgccacacccgtttcttctacgtgaacatttgcctgcatctcaccttctaactcctgggtgctgtttgtccattttcactacaccaggggcccccacagtatatgcagaccaggtttcctggcctcagagtcctggcaggacccgtctgaggggaaggtccaggttggtccccgggcagacagacagtcctctgagcagcgcccacatccccacggaggccacagcacccagcctgccacttaaagaggcccctcaggttccctctggcctagcctgcactgtggagggtgggggtctcacaagcacagaaggaagaacacaggtgtggcccacagacctccacctcctggctacatcttgagggctgagcaggggctggggggcactggggcctgtggctcctcccaaacccctacaggggctcctccatgctcccctcactctgccctcctcagattcagcgctcctcagggcagcccaggcaaagcccgccacccctgagaaggcacagggttgcggaagcacctgcctccacacacacactctccagccacgctggcctgtgctggatcctgggacctcacccattcacctatggcaggaagtgaccccatcttgggtagtgaccatctggggctggtgttgtgtgggccataaaaagaatttaccaaaacagttgtaggtaaagaaaggcagatttattagagaaagtagaaaatgtgcatagcacagaagcaacgggcaggtcagcaagggaggagccgaagcaaggggcaggtcagcaagggaggagccgaagcaaggggcaggtcagcaagggaggagccgaagcaaggggcaggtcagcaagggaggagccgaagcaaggggcaggtcagcaagggaggagccactgcaaagaaatgagggcttgctggggatgttataggacggcgcctgtgctgtgtgctggagagggccacaggcagtactgataacgccaaggttgcagtcagctaacatccattctcctatcagccaagggtctggcaatagccgggcacaggaagattgtgagttatttcttcaggagggctgtgtgtcctggacagtgaagaagggcagacttaaagcttctttgcttcttctttttgccttccctctgtcctgccagcccgactccttttccctcattaggattccacaccccccacccccacatgtcagggcacagccgggctgaccagctccacccgctctgctgggccctcactgagtctcagtcttctcatgtgtgacacaggcaaggtgaacatggtggacatgtgtcaggcgggcgcctgggcctagaggaggaaggagcagggccattgtgggggcgcaggctgggcctggctcctggggcctgggcccagctcctggggcctgggcccagaggaggaaggagcagggccggtgtgggggcgcaggctgggcctggctcctggggcctggacctagaggaggaaggagcagggccggtgtgggggcgcaggctgggcctggctcctggggcctgggcccagaggaggaaggagcagggccggtgtgggggcgcaggctgggcctggctcctggggcctggacctagaggaggaaggagcagggccggtgtggaggtgcaggctgggcctggctcctggggcaataattgctgtgggcggggagtgccagggctgggccatggccccctaggctctctgtgcacagccccccagtaggcccgtgggacttgcaggctctcagcaaatctcccgtcagaagctggtggctgcaggtttgacaccccgtcgtcccatggagttagcgagcacccattctgcacctgctgtgtacgcggcaggatccgggaggcagtgccagccctcagggaggacggaagggtggatggatgcgtggtggctgctcccggctgcagggagcatacagcacaggcggactggacaccagctgaatagcctgtcctgcgctgtgctggggtgcaagggaatgagccacgtcagccccgacccaagtggagctgaccagggctgcgtccatgaaatgatggaggagccaggtgtggtcagaatttgccagggaacagtgaccctccaagagggccgctcagggaagcttcatagaggaagcagcgcttgggcgaggacttggggttgggggagggccaggaaggggagctgcgtccttccaagacaagggggctggagggctcggtgggagcagaggcggggccgctccatgagctacacagcaccaagtctgcgcctgggtggtctcaggtcccagagcctccctctggcagggcaggcaatgaggcaggtggcccatccggggatcactgcctgagcaaccagcaggatttggtctccggccagcagcagggaggaagttaacataaatccattccaatgcaaatgtcaaaccaaccgtgcgcaggaaaacttagcagctctgaatgtcaaggagggagtcccggctctagctggtggcgcggcttggctgagctgtttcctccagctcctgggctgtgggaggaggctgctggcgtgcggccactgcctggcgcagaggggctgccaggacctttgagaactgaggcacacccgggagatgatctggggactcgtcgctggagggaaggagccccagcaaacacagcccagtccagggactcttgtctgcatagcctctgagacacgcgggagctggtgcgcccagggggcctccccttgagaccagggctgctgatgacagagccaggatgcagagcagaaggcaaatcctgcagcggcaggatggcatctgagccaaggctgaggaagcagcaccagaattcgccatcaggccgggaaaaggcggaggcgctggtgggcctcagtcccccggacaccacctggctgcattatgagagatctcctgtttggacaggggagggtctggggccaccgcctgggtgtggtgcccggggtcctgagtccaggcgggggctccaccctgaggcgtgcgtgggtgacgggctcccaagacatgaccacgctgggtgtgaagacaaggccacgtgaggccggaggacagtgcaggccaaaccgaggccaagcgaccactcctcatgaggctgcagggaccaacccggcacgcagagaggcacgaggtgacatccgaggcagggagcacatccagggccacgaaggatggcattgcggagagaccgggcgccgtgtgctctccaccctcagagccacccccagaccctgctcgcccttcagtccccctccagcaggtgcggcctcacctctttccctgcccccactgcatgcagcaggtgctccataggtgctcctgctcatgtgagaggctggtgcagctccctctctctgctggctgacggcagacccaggggtccccgcccagggtcactccaggcaggaggcgacactcggcacagtccttgtctcctgagatgaactcttgagatgaaccattttccttttaaattgaaaaagaaatgaagtgttttgcattttattaaagcagacacggctgcagccgggtagggctcccaaggactcagccaagcttgggtgctgggactttccggtggtcactgtcagagaatccccaagcctggggacatggccccggctggagggaaggagggggagcggatggaaacagaaccaacacccgcaggacgcagctccaggcaggggacggggggcggtgtagggggcactggttcagggtaactggggggctccaaggaggaggcggggctggaggtggactgggaggggccaggaagttcaggaaggttctagaagagagtagagagggaagaaggcaggtatggggatggcatagagagccgccctcggagggtcccagtgctgctgggattttcccgtgggccatgcagacttcagggcaaggagcaccacagttggggggtccgcgggcagcagccatgagggaggaggcggccggggctgcaggaggaggtgcgggcccagtggaggggaggggctgcaggaggaggtgcgggcctggccgggtggaggggctgcaggaggtcctggacagacaagctcacaggagcaagtgcggaagcccagctctgtacacacggaagaagcttccggttagaatccttaaaccggcagcttgtgggttggtctgagaagatccaggtgcttacaactggtgtgtgtcttaggggctcctcctcagtgaactcctgttccgcctttgagagcacctgggtctctcagtggtgtggacatctgaggttggtggttggggcaggtgggtgctggaaggtgagaggtgcctgttgtctgcccctcagggacccctggtgacctggtggttctgagtcctgccaggagtggggaccgcgggcggccagactccgggttctgcccacagactggctatttccctgggcccccttgttctacttttgggcctcagtttccaattcttcaaaccagcaggttgatgctgtgggcccttcctacagcacagtggtaccgccccagagccaggggaaggaggcgaggagggtgtggaccaggcgcagggctgtgtggggtcagctcccgggtgtggaaggtgatggaggggcagagagtgaggagcaggagctgaccgggacaggggctggagcggggctgtgctggcatgtccacactggacacaggatgaggccatctgggaagtgccagaaggtgattccaagacctccaggccatgaaggatgagggagccctggaatccccggcccagcgcccaggcctcagtatgctcaaaactgacaaagttcttatagctgctaagcccagttttgggccccaaggagatgaccatgggcttgtcaaggtcccctctgctggccaagacccagcccaggaggaagagggctctgcccttgtcgtttgtttaaattgtgaaatacacagcataaaatgtaccatcatcaccatttaaagcatgaagttcagtggtttaagtacagcacattcccactgttgtgtgaactttgccaccgtccatctccaggactttcatcttcccaaactgagactctgcccccattaaacactcacccccatttctccttcccagcccctggcacccacctcctaccatccgtctctgaacccggctactctaacacctcctagaggtggaatcgtcctaccatccgtctctctgaatctgaatccggctactctaatacatcctacaggtagaattgtacagtgtttgcccttttgcgaccggcttatttcactttgtaaaatgtcctcaaggttgtcagtgttgtggcctgtgtcaggatttctctcctcctgaggctgagtaaattccatggcacagatggaccacgctggctcatcctcctgggctgcctctgcctctcgtgaatgacgctgctgcctacctgggtgtgcacgtctcggccagaccccgcgttcaggtgttgggggcctgtgccccgacgtggggttgctgggtcgtctggtaattttatgcggaatgtttggaggagccgctgcctgtgtgttctctgcagcggctgcgccatgtcacctccccatcagcagcgctgggctcccgcgtctgcacgcgctcaccacgcttgttcctgcctttctttccacagctgtcccatggccaggtgtgtttgttaagtaggactcagccctgcacccagagcaccctccctcaagtgctcatcctgccccccaccctgtctggcggcgggcccccagctccagccacggtctcctcccaggcatcggaacttcccggaagccagtttgccctcccagtccaagttaacgtgccctgggaagcccattcagacccagagccaaaactgggtcaccatgggatgctgggtgtgcatggcgagctccgggtcctcccacagctccagttctgaggggcccacaccagctgccctctgctcctccgtcaggaatgggccccgaagctagccaggatggtcaagagaggtcttccagagcaccctgctgagcagtgccaggctggagggacgctggctgaagggcgccagccgggcacccacccgccacctcgggctgatggagagatgacccgccctggccctgtcctcgttggcgatggatgcccctagggacagcggcgtgaagctctgccccactgtgccctcccccagtcaccatccgtgcacagcccagcaatggcccggggcagctgccctggggggccccgcacgtccctagcgccctcctcccagcacaagtgccccgagtcttgagcaggcgtttctgttcgcctgtccctctccggagcagcaggcggtgacctgttgaattctgtaattcctgcgctgggtctgggcttcaggctccgtgagcccaggctcctgttggactcagtctgtgggaggtcttggggcgagcgcctgtttggtgaatgatgaatgagtgaatgaatgagtgaatgagtgaattcgtgcagccacctgctgcaatgtctctgggcctgttttcaggcctgtcataatcaggggcagagccaattctgagaatttaggtcacaattctaatcccacgtgtccttgggcctccaggtgctggccaacccctgcataccaggggtgctggtgtccaggtggctgctgtggcctcagcagagggcaggcaaggagcgggccagggggactggacagcccgaggccaccaggccaggacagagtccaggctacagccgactgaagccatggaacggcccctcccggttcggccccacaggagcccccacccaggagccaggagccaggcctagagagcctgggatctgtgtgcctgtccagcttcacccgccttgctcgcggaagggcacacacagagggacggggactaacgcatgcacctccgtggtgtgcccagagctgcggccgtggcctccctgtggggcaaagccaggttgtctcaactcagctgtaggtttagccgagcagttcccgcccagggtgcaggtcgggtgggcctttcagggcctcggctgccaggtgtagtgggtgcccacggggaggagtgggtgcccacagggaggagcgggtgcccacggggaggagcgggtgcccatggggttctcctctgggtgagccctgcaaccaggcaggcttcctaggcttggccaccagctggggggtgtggggtctgtccctggagggggccgtggggtccatccctggaggggtgtggggtccatccttggagggggccgtggggtctgtccctggagggggctgtggggtccgtcccgagaggggagcgtggggtccatccccagtgagacccctgcaggcccagctcatggtggggctccgcactctctggctggccctggacaggggactcttgagttcccctggagaccctttgggcagatgggccccccaccatgcttcccatcaccacgttgaccatggccccctctagcccttctcagaccctcacacgtgcctctgtccccgtgtccccttcagactggagcattcgggggctcctgcaaatgcccctttgtgagtgaacccgcaggtgtggggaagcgcccagcagccctcatggaactcgggatcacggcaggaagggggcaacgtggatggacacctgcaccctgtgtgggggtataaatcaccctacagggcgctcgtcacctggccagccaggtaggatgtcaagatcgccacggagccccccagctgagggcctcagcgagcgtggggaacaggagggcttgtccagaggccagagatgagcagaggaagatttgggcagggagtgggggcagggagacagacaagcagacgggggccaggccaacaacaggaggtacccaagtggacacatggtgaccggcgatcctgcccgggcgagctgatggaccacaggtgccccagcggcaggcccaggccccagcatctttctgggtggctgcaggcctcagaggggagggagagctcggcgccccaagagagagcccagggaccacagcagccccacagcggcccctcctctggccagagccctaggacccagccgcccctgctcctcactcactgtggcccccagccccactgtttcacaacaccccagctcgttcgtgccctgaggagagggaccatccgtccccacacccggtccacagcaccgcacccgactcagccccagcatcgaccagaagtccccggccctcagaccggccgcccagagacagtgggagtgaggaggccacacaccgtccaggttgaatcactgcgttttactgagtgcacaggtccacctggcgtccgaactcgtccccgtggcagcagggatccccagaaccttccacggccatcgcggccgcaggaccccacacccgaagtcccccgcaaacccgcactggcgcattcttacggctctggcatcaacctgtccgtgtgagtaagttaatatctcagctaatctgttagaaaactagagttcattccctgggcgtctatccctagaaaatggacggtgcacaaagttgagattgaagtgtgcggggtaacacatccaccaaaaaaaggcctggtcactacggcacaaggacacatacaaaatggtcagaagtgtacgtcggtactgaaggcattatgaaatgttctttggagcatgaacaaaagtgcagacagccagaggcaacggcgcaaatggggaagctgcagccaccgtcacggccagaggatggcagactgcaatggcgtggggcgcgggcatggcgggcacacgtgggccgtgtggatcccgggcagagggatggcgtccagcgggaccaccagctctgggcgcctcagtgcgagacccctccgtgagacccctcctgccctgcgcgtgtctctggagcccgtcccttgggcccctcgcccgccccacctgttcgcagggtccagggcgtccgtacctggcacagccagggggcatggggcgacctcagggagttcctgtccacatgcattaaggcaacgactttgtaaaacccaggcggagttggcgtgtggcgatggcgatgtgcacgtgcctgcctggtagccccggggaccggcccctccttgctggcgcctggccgagagtcagacgctgaggacctctcaggacggggcccctggccagagccagtctcctcggccagccaggggcaccacggcaagtgtccaagcccagagcacactcaactccaccccacaaacgccttttaaaactctgaagaggcccctccatcccaaatggtcccctcccgtctctcctcctccaccgttgcccacaacctcccccggcgatgtcacctcctcccagggtcggccgtcagcccccacccttacaagacggcaaagttcagcaaactggaacccccattcactcatgctcccgggtcatggaaagctcctgggtgtgcagcttctctaggtctcccggagggacaggaacctgcgtattccctcgaccccggagtccaccatcccacatccttcaggaagccgccctggctgtctctccggctgcttagcgctttgctggggccgaggtggagactgcgcgctgggtgggaatgcaggatggctgcccggcacagccacacaggctccccaggcggccattccgtcctgcagcccctaaaggccctgaccaggcctcttcacgccacccccatgccctggacatacgtgcatgtgacctgggagttctgcatgggtgtgggggttgggggaggcaccggacaggatcagaggacactgggggcacccgtgcactgagcacccacccctcagagctcagccccctgctgggcaccctccacagcaggtccaagcctcgtgagctgtccctctcacaccacgtctgctgggcaccctccatggcaggtccaagccttgtgaaccgtccctctcacacgtctgccgggcaccctccaccaggtccaagcctcgtgagccatccctctcataccacgtctgctgggcaccctccacggcaggtccaagcctcatgagccatctctctcccaccacatctgccgggcaccctccatggcaggtccaagccctgtgaaccatccctctcacaccacgtctgccgggcaccctccatggcaggtccaagccctgtgagccgtccctctcacaccacgtctgctgggcaccctccaccaggtccaagtctcgtgagccgttcctctcacaccacgtctgctgggcaccctccacagcaggtccaagcctcgtgagccgtccctctcacgccacgtctgccgggcaccctccacggcaggtccgagctttgtgaaccgtccctctcacgtctgctttgagggtttgtgtcaatggggctgtgcagcatcaacctgtgatcttgccaatgccccagcctctgctctgtacggcattcatagctcaggagggcggggacaagggcgtttctgcaaagctctcacagctccttctgctcctcggcttctgggaagcaactagaaatagctgagagcccagctctttctagagagaagggggtgtcctttatgggggtccctgactgtgggggaccgagcccagctggagtcctcctccccttctctccggcagcaggtctctctggcagcagggtctggaatctagaaacactgagacctccagccccgaagggggcaaacattaaaccacacgccctggctgtgcctctcctccgggcgggacttggggtgatcagacccacagctcaaagggtgccccctggagaagccctcacagtgcctggggtgatttcagcctccaagggggggcttgagacgaggccccccaaaaggtaggggcatcgctgaggggcagcgtgtcctccggtggggggtgttgggcacctgccctgctcagacggctgtgtgcaggaggcatgggaggagccctcccccagcgtgtcccagccgtggtggcagctggaagactcacggactgtgattttatgcagagggagaaggagaagctgggccaggaaaccacaacaggcagcagcacctgcctgggctggggcctgggattcgaggctgagccacccatcccaggagggcccagcacctccagggcagaccaaacacaggacccaaccggacacccatacagacaccggggcaccttggcatctggtagagcccctcctctggatggctgccaggctgtgggagggaagggcagcacgagaccctgattgggctctgcctggcgctctgccactgcggaccaggagcccggacagtcggataccccacgacggcgcttgacattccagcatcaccacgacccctaaagccacaattactccttgtagcccctccccaggcagcttacactcagcagggtcaaagagaaagaccagagacagaagggctccaaggctggaagtgcgaggagtgtgcatgcacgcgtgtgtgtgtgcatgtgtgcagtgtgctctgtgcacttgtgtgtgctgtgtggtctgtgcacctgtgtgcatgtgctgtgtggcctatgcactttgtgtgtgcatgtgttagtgctgtgtgtggtctgtgcacttgtgtatgtgtatactgtgtgtgagctacacgtgtgtgcatgtgtgtgatctgtgcacgtgtacatgtaagcgtgcatgtgtatgcctgtatgcaggcatgtgtatgcacgtatgtgtactgtgcatggtctatacaggtgtggtcagtgcacatgtgtgctatgtggtctgtgtgcatgtgtgcaagcgtgcatgtgtacgcctgtatgcggacatgtatgtgagcacgtgtgtgtgccagtgggcacgtagggatgtgcactctaacaaacactgcgggagctctttgccatgaggtggcactggtccttggccacgctcattcacgcagacacccgaggcagcgccgcaccacctccagcctccttcccgctgcacttctctgaggtggggcagtaggtggctgcactgctcaggctagagtctgggggggcccaagacagaccctctacccctttgtctcccaaaacagggccccgcaaccatcccaggacgtgcaccttccctcttcccagggcccagagacttcccaggggacacaccacacgttccttgctggacatgagtctggcctcagtccctcctgctgggcggccagcttctgggagggaagggattggcctgtcttcctcatcctgcagagccccaacctgtgcccaggtgctcatgcctcagcggccccatgggaggaaagagcaggcggggcctcacctcgggggaggaaagagcaggtggggccatactgggagggaggaaagagcaggtggggtcacacctcggcaggggaggaaagaacaggtggggccacaccttggggggggaggaaagagcaggtggggccatactggtgggggaggaaagagcaggcggggccacacctggcgggggaggaaagagcaggcggggtcacacctgcagggggacacacagcacagcctccctccactgccaggtctcccttctccagggtcctggagtccaggtagctgagacggaactggggacacggggagcggtggccggggctggtgctgcgttgggtgggacgcactcatacccctgcctgtgggccccgctatggattccctgccccatgacgggacggcaaagggacatggaccccaggctcgagccagcccaagggagacagcaagggcaccgccgtgaaacgctgcccccaaaacacgtagcgatgcccacaccagaagggatgcttcatgccaccgcagggcccgaggccacacacgctgcctttgggaacagagcagacaggcagtgggagcctggacagtggcttccgaggcctcccagttggcacctttttgggacaggctccagcacagggaggggtgaggagacagcccagcggaggcacctcaatggcgacagggcctgggagtgccctggccgggctgggggtaggcagagaggccagggcagcagctccccacaatggacgccagacatggctccccgaacaccctgagcgccaggacccccaccagccaggggcgtacgaccctcaaatgctgctttcaaagtcctctccctcaggactggttcccctgctggcctcagggcctcaggacctcccagccaagccaagtgcactgaaaacgcaggtggaggagaaacgggcccaggactcccctgcacttgctctgcaggagtatttgcgcccacgaccccagccctgctcactcccagggaggccactctccagggagcccaggcccgcctgcgacgccgtcacgccaaatgccagatgctcccggggtctggttcttaagtctggagctagggactcgctcccgcattagagccgcctgccccaagggccacggtgcccacaacaggacgggcatgggacggtgcacccgaggcccgagaccccaagaggccccgctaaggaatcggtcagtggagaaggggccatcagctccagggggcaggagagctagggagggcgcacagctgggctgaggtgggagtggtttcctccggaaaggcggggagggcggccctgtgctgacggtggaggctatcctggcccgctgcatcatggcccagccctgccccaggtctgtcggggcactggtgggacacaggcgaggtggggccctggctaagaactgtgaggcctgctcaccaggtgggtctcgcagtgccggcacccggccagggcagtcaggagagaggggaggacttggggtcctgcccccccggtctccaaggctggggtgctgctggctctcacgcacccacagaaaggccagggcgaggcagctggagcccccaaggaccccctttttgaagaccctttggagccggctccctggccccaccgtgagccaggccctccctctggaggccaagaccagagggctggacgtccactctggctccagtttggttcccaggccccacccgctcctcggctgcaggcgaaggtctccacctcggggctggcttccatggaaagagccctcagatcccagaaggtacagggagaagacgccaaccaatagctctgtatttgggcgcccctgaggtggggaacaggaaagcccgccgggcaggtcaggtgtgaaggcagaggccacgcacagcggccggccacacccgcctgtagctgcccggaaaccccaccgggacccaaggccgcaggtcctcaccaaacaggcccgccctttgcgcaggtcctcagggaacaggcctgccctttgtgcctcccctgggctcggctgagacaaccccccgcctgttgccacgctggcaacaccccgtcatcactcccgcccctcctcacaccgggctgatgtcggccgcggccctgagcagagtggacagggcagccttgctcctgcacgctgctcctggagccacagggccctgcccagccctccagcccctgttggaaaataacttttgtaaaaggtcactgccaggagcccccatccttcagcccacatgggcccctccagggcccacccttcccgccacactcagttactgtaagaaaagggccccagagggttcccgcctcaaaacctcggaggcaccgtgctgaggagggccgcgggcgggtccactggcccagcgccgcctcacttcctgggcccggcccagcccacgtcaccaaagggaccctcgccggtggccgagcgtggcgggggcccgcacggggtacagaggtcggagtcggtgtctgactctccctccgcaatgtagggcctgactttggcacaaggcgccacggccgcgtagcagctgttgagagcatccaggttctccttggactgggagatgctgaagccgctgaaggaacgctccagctcctcgtggtccacggacgggatggagatggacgtgtcgctgtcccgcaggttcccctcggggggcctgcagcccggggtgtcctcctgccgcaggaactccatgctggcgcggttgcccccgccgtaggcggacagcgaccgctcgtgggcaggcggcggcgggatgcgcaccagggagccgtggtcccccacgggggaggtgccgtggccctggcgcgggtggctctgtggctgccaggaggtggagggcggacactggacagggggcgcggccgggggcgccgagaagttcttctggcccgtggagctgctggagcgcacgatcttgacaatgcagccgtgcctgtcgacatgctcccggctgtcttccgggctgtggtacggcggcgccggctccggctctttggccccaaagtaggcctcggtctctgtcggggggatgcccatccgctgcatgtagatattcaccaggaagtccagcttcttctccatggacaagacctgcaaaaggggctgctgggctggggtgcgagggcccgtcccaggagatgtggggacccaggctgctcccaggaaatgggggggcccaggctggttccaggaaacaggagagacccaggctagtcccaggaaacgggggacccaggctagtcccaggagatgtggggacccgggctgctcccaggaaatgggggggcccaggctggttccaggaaacaggagagacccaggctagtcccaggaaatgggggacccaggctagtcccaggaaatgggggggacccaggctggtcctaggagatggggggacctggaccactcccaggaagtcggtcgacttgggctggtcccaggaggtggggggacctgggttgctccctggagaggtacagggaggggggatccctgctccctggaagctggaggagcgggaagaggaggcccaggagcagctcttcctccttcccagacccctaggggcaaagcctccagctccacggttggggcgtgtgttcagagccaggccctcctgctgcccaccgtggaacccccttcaggaaagccccacagggcaggacctggcagttccttactcactgctcaggcccggctctcagaagcaggccccaaaacaagggtcctctgcggtggttcctgagaatgcacccccagaagacagcggccagggtgtcgggcaaggaggacagagaggaggaaggccaggcaggtacaacttccggcacgttccacaaggaacccctgagggatccacctctcagcagcccccacccaggactcctggggactttggcccttgggtactgtcaggagggaaggcacccaggccgggggtgggaggctcacggtggggtgtgaggggtctgcacagagcagctgtcagtggtgacagggccatgtaaaccctagacttgaggagccctccgtggcacccagcccctgaagcccacactgccacaggttgacggcaggcaccacagccctccagccccgcacccctcccgcccagcctctcgcacctgcttctccaccttcccgagccgtcccatcatgctggggtcctcgggcagctccgcctcggccgggcccttggtgcggtccttgtccgtgatcgctgggccccgccccacgatctggtccactctaccgggaacagagaccccaaagcatgagttcgggtgggtgcagcagggcccctgccctctcctcctggaccaggccacagtgcccctgggtctaggctgcaggctcagcccagagccgaccagggggcagtgggtgccaggacagatggacggggtgcgccccgttctcagcccgtcttctggcaccgtgaggttctgctcctgcccgctctgtccccaaggggcctggcacattagcgaggagtaaagtaaggacgctcccaccagggccgagtcgcccggctcctctccgtgggctcccggctccataccgccccctccagccagccccacctgctcaccctcttccctgcccaaggcctattggccccacagcccacggagggtctcccactgcagggcctggagcccactccagaggatgcccctccccctacccgtgcccaccccggagctttactcctacgtaatgtgccactgaagccgtcggccccaccgggtctgatggggacggagttaaatgtctgcggcggggacaacagaagcagaaaaggcgtgagagctgcggctccatgcaccaggacaaggagagaaggcccagagcagcacaggaaccaacgcacaaaccagaagaggggagacaaagctgcgagggtctgtgtgtgcacgtgtgtgtgcactcgatgtgcatgtgtgtgccctcatgtgcattgcacaagtttctgtgtgcacgcgtgtgcatgtgttcatgtgtgcaagagtgtgcacgtttgcgtgtgtgcatgtgtgtgtgtaggatgcagaattcagctgagctgatctccaatgaggccacaggtcactcatgacaataagaagggagggaggctcctttgccctcagggacgggggcttctgaccagtctggtatccacagagtcacggccactgctgggctggcaggggccaccacggtgggtgtgcgctgaggcctgcagctacgtgggaactcacttggaaacaaagaccctgcagtaagtctacaaaagcccagctggacaagggcagctcaagacggggtgtggctgagcaggacccacccaggagaggccacaagctcccaagtctcccctggactggggcctggtacatgaagactgccccacaccagccgacggggccaagtcctcacttcctgccactgggctgccctacctgcctctgatggtgggggagggacttcctgccactgggctgccctacctgcctctgatgggggcgggacttcctgccactgggctgccctacctgcctctgatgggggcgggacttcctgccactgggctgccctacctgcctctgatgggggcgggacttcctgccactgggctgccctacctgcctctgatgggggcgggacttcctgccactgggctgccctacctgcctctgatgggaggggggagggtgggccaggggtgttatcttctttctgttgcgagaaacagagagggtttcaggctcgcgtcggccacagtgcagctcctcatgctccgcggggcttcatgctggactcatgcaatagggccaggagggcgggaggggacggcgggaggggaccctctggctccgagcagacgccagtggcgatggaggagatgggagtccctggtgttcggggcatccacacagtccaggcagatgctcagcaccttcgcccctgccacatgacgggccgcccgcctgctcagtcccaataggagccctggccacgggctcagcctggagctgctgctgggggctcctccaaggaccctgtgcccctcctgccctgggcccctggctggaggagacttgatccctgagtgctcagtgccccgtgaggtggggcaagcgctccaactgtctccctggccccctgtgtgaacctgcacgtctcctagccacaagaccgtccgagctcacagctgtggatgcccagctgctgtctcttgcggcaaggcacaggaggacggaggaccagccccagggcacagcactcttgggcatgggggacaccacagagcagggaacccggcaaactccgtccggggctaccctgggttgggcagtaacagacacggccctgcctgctcccagaaactccgttctcacgggaggagcacggggctgacatgtccagtgcacagacacttggcctcacaggcagaaaccccaccacagagggaggaggggtcagactcaccccagacgccgtccccaccagctcaggcctgggcttcatttgcccagacactggcattggctgtacccagaaactgtctgccctgagctgtcagggaaggccaggggtctatgctcagcctccaggcctccgccccaggggctctaccctccctcagccaatcagacttgccagaagacagggaaccaccgtcatctgaatagtccctgggaggcaagaaggccttggaaagtctgagttaatcactaaagaactggcttctgccagctcacgtggagctgggccgcacctctgttctgcccatcagccggggctctcgccagctcccttatcaaaaacactaattaggatgctggcagcttgaaagccagcaccggagctgctggagcgcacgcctgtgccgggcacctggcaggcctcttctcacgcttcttcccggtggcttaaggggtagatgctgtgaccgtctgtatcttccacgagagggaagagacacagagatgcggctccacctgctcggagccacccagggcccaggtctgggccgtgcacgtggccaggcccacccccacagtgggcaggtgctgaggggcaggtcagtgcctggggaggctggagagccctcagccaggaggggcctgtccagggggcacgggcagggccagagggatgtctgtgcaggtctgatggcatctgatcctggaggtgctgcccgggggcctcccaaccccagagggaaatctcacagggcatccacagagcccccggcttccccagggcacttgtcgagaggagcagtggggcccctggcagtcctgataggggcacagcctgcctggggccctggtggaggaagggccttctccctcttgtggctttttcaggaacagagaaaacccgagtgtcccctctgtcccggggaaagggtggtacaaggtgctgccgtcatgtggcctggagcgaaggggccggccattccacagacacgtcggagaggcgctggcatcctaacctaggtgagtactggggtgactctctcggaggggccgtgggtcctttggtggggtacttcttgtgccggggagttgaagggggcgggggacccacaatcatatctatcctggcagagtaaacaagaaaagagacaccggcgaaacgcatcgtaaagccacaggaaatgaggagctggccaggaactggcggaaacggaagcaacagggaggctccgtcgaaacaggtgctctcccacagagggtgtggacgccgcctcgctggaccttggatttgccaagtccttcccgtgtttcaagcaaagcttttgactcgggagcgggtggcgggcggccccactgcggagacccgggtgccacgtcccagagcgtggagtgcaggggaggtgcccgcagcaggagccggtaccagacaggccgcggcggggcaacgggaaacgcattgtcaggagccggccgaggactcctggggtccttggggtgtttgctttgttttgtttgtttttccagagagagagggaaggaaagggaaaatttaggacaagagatcctggtgaacaaaaacagctgaagtgagagagatgtggagacaaagcacagaagtcaagacaggagggcgttccgcacacacacgcacacgcacacgcagccagggttggccgctgctccagagaggacgctgggaaagaggcctcacagctggagcccagcggggtgaaggggatggctcagtggcccctgcacagcaggagtgggctaaggcctggaggcgccccttccctggccccctgaagcaggactgggcaggagccccagggtggggctctcgacttcctcagatgagagcttcactcccactggagggcccggagttgggctgtgacccccaggctgtccctgaccatcccagccttctccctgtaacaggggcccagcctcgcttccagggctgagaaactggtacagccttggttggggggcctgggagagggaggggaccctgataggcaggagcatgtcccctactgcaggagagactctcaacagccgtgtgtccccattacaggcaacataaacacccactcgtgtgtatatccttgtttgtatgtgcctgaggctgcacatgtgtgggcacgtgtgtggacttaggggacacctatgccaaggagggcaggtagaagaaaaggtgccaagtagcataactgatgcctggtggggcccacgggaaccctgcagcttcatgtctgaacagaattattccatccccaacacacatgcacacatgtgtacacacatgtatgcaccccacacacgtgcatacatggcagagcagagccacacgtgcatacaaccacacacatacacctgtgcagaagcatacatgtgtgcatgcgtgacttacacacacacacatgcacacacacattttcagggacccacacacacaggtgcacgcacttgcccaccgcggtgtggatgggggagagatgggagagacagcagaaatattaaaacagactttgtgaagacacaacagaagctgacagaggccgacgtgggtggggaggaggccccgcccacacaccccctgcactcccaccatgggccacagtgggctttgtcccagaagcccaccccgttcttgtcccctgctggacaggcaggcggggctcttgcctggactgcaggctcttaattcgggacagcatgtccaggtggccggctgagtactgctcgatgacgtccatcacgtcgtagggccgcaggctctccttgaacttccgcttggacaccaggaaccgcatgacactgcaggggggtgggtggggctgtgagccctgggccagagacccccggccacaggcaccaggaccttcctagcacctctgagacctcggcgcctggagatggctggacttgcccctcttgtctgccgcccaccagctccacacacagaagggcctttatgtggccctgctctgcccgggacaggtggggcttgcaggcctggccatgcccccttggactccatgccacagcaggcagaaggtggctgagttgcttcctaagccaggtggagcccggcctcaggcctcttgctgaaccggcatcccacccgaaacccgcctgagtcccagaggagtgcactccaggacattcagccaggtccacccgtgtcttagccctttcttttcccagtagactctgtctctgggcggctctgtccagcaccatgagcaccggcagcaggcaggaccaccgagcgggaggcccctcctcactcccccaggctcccggctgggcaggggcctcaccacacggctctgatgctgactttgaggcccggggtcaggtcctcggtcacaaactcgcaggggcagctcttgtcatccacaatgtcctctccggggaggcttgcttctggggggaaggagacaggccgtgaggggccgagggggccgggagacctattcccggggtcctgcagggcacaccggctagacagagcgccagggagcccctcgaggctccctgtggtgcccctcgggtgcacctgcttttctggaaacccacccatctgcacccagctgctctcgagtcaggaccttccccggcaggctgtggccacagggagtggccgatatggggcgtcaaaggacattctggccaatggatgaacagaacatggcgcatccacgcacagatgttaacggcggaaggtgcaggcctgacatctgaggctcagtgaaggaagccagacccaacggccccacgtgggagccgcagacacgcacggcccaagagcagcgggtgctggggctgaggcggggaatggggtgactactgatggggtcatggtttccttctgtggtgatgagaatgttctggaactaggctgaggtggtggtgacaactccaccgtgagcgtgctacatgccactgaattcctacacttttaaatagttaattttaggttgcacaagtctcacctcaattttagaaaggatagggggttcccactccaagagcaagcaaaagcagctgcgacgccacagggtggccacagtagcgtggccaccacatccatccccggagaggatggaccaggagaggatgcggccacacccaccttctgagttctgccgtgacgcggcacccttgatgcggaaagcctggcgtgcccggctgcggtccccgaagctccagctcttgggcaccttgctggggctgtcctcgaggctctggtcggcgctgggtgaccgcctcacagtctgggcctgcggggaccccttccccttggcagccacgcctcgggggctggagaagacacgatctttcaaactgaccttctggctgctcccacgggaaccgacagacagacagaaaaacagggagagaagtcactctgcaaagaacacaggccgtgtctgctcatggccgacgccgcccatgcgccggagggagacacaggtctgaagaacagccagccacacgggtggctcagagcaggtgccacggggaccgagcacccggcgggagggagggaggggaggccacggggaccgagcacccggtgggagggagggaggggaggccacggggaccgagcacccggcgggagggagggggggaggctaccggggccgagcacccggcgggagggagggaggggaggccacggggaccgagcacccggcgggagggagggaggggaggccacggggaccgagcacccggcgggagggagggaggggaggccacagacactgagcacccggcgggagggagggaggggaggctgggtgggcagcaagctcccccggctggctcaggcgtggccagaggttggccatgtggggagagttgatgtctgtggactcttaaatcactttccgctaccaccacgaggtgccggagccttcctcacactgtcctgccagcccctcacccagtgacactcagggcaacgggcatcccaaacaccggggctgtggctcttcctcgggcacctctgtctgccccggccccgcccgtggtttcccctgtggccttttcacacccgtaactgctcccaggaagcagcctccctcctcccctcccacggcctgtccctctccttctgccccagagtcgaggggccaggggacaacaaggacattgggggccaagtctgcggtggacccttgttcagccacactccggcctttccacccaccccgggggcctgcctggtgggatgggcttcaggagggctcaggcctcccctgtcaggctcccctcccaccaggtccgtgtcagagaactgctccttccggcttctggaaggaaggaatggataacggggctcctccgccagctgggcctcactatccaagtcctgccccagggcagggggaggcagcctccaaagccacagcgctgtggcccggccccctcggcctgcgaggcgtgaagcaggatttgcagctgtgtctggctgggtctccagctccatactctcggggggtccttgggcctgccttgcccccgagttttttggtgaccgtggagatgggtttgcacccgagttcttcaactccagcgtccgccgggcgacagtgaggggaggggagggttcactgtggttggtggttgggagacgccaggcagatgtggcctcctgaggtctggaaagcatcagaaccccctggctcccttgaggacagtggggctctcacgaactggggacccgctcatgcccagccatgcttagcagccacggaacttctcagggtggttctgggcagggcccagagcactgttgctggagcctgaaacaagccttcgggtggggaggccccgcagatccctgacacacttcagagaggaagcccagtgcctcacgggctccctgatcccacggcggctccccagccaacagcgagggactgaggccccggtcagcagccaccatcagccccgactccagacccacagccagagagacacgcccaccagacggcacagagataaccagccacagacatgagagcccaccgcgcccgtctgcctggcctggacacgcggatcgcttggctgcccctccccaccccatcccccaggcagcaggtgaccgcccagaccatctgtgcccactcagcagaccatctgtccccactcaggcgtctctgagagaaagaaagaagcccctgggtgttgtgcccgctcggggaagcagagacggagtggccgagatcccccgagtcccgaggcgtcgcgtgcttggggacgtcaggagccgatggtacaggctcgctcaggaccccagtcctgagtccacacccctgcactgcctgaggccaacacaccgtgcccatgggggccaggggtgctcagagtcctggtgctgtgggtgcctctgtcccaacggcctctggtccccatcccaacaacaaaagcacaggtggtcggggagaaccggacgggggccaggggagcacatgggcacaggctcagcgggactcctggaatgttctctctttctccaccgcacgagccatttcaaaggcaagaataggcccctcctgaccccgctcaggcaggcctcagggcaagtgggagtcactggaagactcaattcctctctctgcgtttccacccgaggcaggtccagtcaccagagagagaagcagccacctcctttctcacggcagctggcaaagcaccgggtggaggacagagccggtcggcccaactgtagcttcggggctgcccttggctggtctctgggcagagcccggtgctgagggcttgcagtgggaaaggcacagcttgaggaatgggcatcagattcccacctgcggccccggaggggaacgggtcaaatacccaggcggccacacagacgtgcgggccaggaagggtcaggccccacagtccgcagggagttgcaggaagggagtggcgtggattccacaggccccaggagagaagacccagccccgacgtctgcttcccatttttcaggggggaccccccgctgaccacgacaaggagccacagccccgccagcggcagacacaccctgctggacccgatgcccagcacagccccaggggccgccgggacgcagcccacgtgtactgccccagacagagccggcgggaaggagcctgccctggcctcggcgcggccctgctgtcccgggtctcgggctccgctcccacctcagatctgcgagggaggctctgccaggaagaggagggtggcgcgacctggacatgtccttccctcccctggacctccaccatgacccaaactctgcaccctccaagcacagctggtgaggctccatgctgcagacacccgaccccgccagcctgcctcagctgccaggagcacgcgtggtctcgcaggccctccctcggccacaagccaagaacaagcgcacgcgaaaagctgccgccacccacctgggaggagccctcggccagagctgccctctgtgtgcgaggggcgtccgtggcacctacgcttggggcttacggggccggggcaggctcaagaagcacctgagagcgcgccatccccacccggcctgccaccctccctcccaatggtgaaattcagatgtgcggtgcccgcaggaaacaggaggctgaggagcatccagacccctgcccagctggtgtccggaccaacgacgcccaggaagcgtgaggatgaaggggcctcccgtgggggctgctcgcagcaggacagggcctgccctgggttgttctctggcctgggctcccacccccactttcaaacccctctggtccccaagcagcctgacctcagcccctgccctgagggaccagcctgcggccagaagcaccctgaatagatgctccggacacgcaggacagctgctagcgccccagcaggccatgccccaggcagcccacacgcccgtctccctctctggagctgccaacagtctccccgcaagcaccaacgcccccagaagcacacaagcagcaaagtcacagggagagggtggcatggagtcgcgggccccccatggagcagggtccgaagcatgcacggatgcagataggcagcatgcagccccaccagccctccaaggccagcaccaccggcggcatgcacatgccaaggagagccccacaggagcacgacacagccacctccaccttgctgggctgtgctggccaggagggaggggcccccagcgcaggcctgcacacacccaacagcagacaggggacgcggggacaggggaggtgcgggtcacggtgcaggccaggagcccacggtgcaaagggggcggctcctcccccgtcctatttccacctgccctaaaccaggcctgttgttgggagagggagccgcgggcctctggctttctggggcttctgatgcatcaggaccctgaggagcccggcacacacagacggagctgcctcccgcggtcgaggcagccaggaaggctcagtcatcctcaggtacgcagcagaggtgctagagtgacagccccaggggaaacgctccctgaagagcagtcggggaccccaggaggcacggacgccttgctgggttcagagcccctggctggcccctctggctgtgcgcaggacatcgcctggcgtggggagcaagaagaagcaccttcccccagctccgccctgcacgcagctgtcggctagaatagagggagctgagcccgcaccgccagggcggtgggtcagaattggggttggggcgccagcctccccctggctcctccagaacctctagtaagcagggaggggcagaggagccgtgcagcagccgtcagtccgtgcggcgtgttccgcggtacctagagcgtccggggcagcatccacacaggggccctctgcacgggctgcctttactggaaatgaggagagcacagttagtcctgggcgccggcaacagcacacggccgggagcagggaaactgaggcactgcaaccacccagggtgttgtgtgcagtccccagcggcagagcttgcgcccaagcaaggccagcgaggaaggtgcaccatcgtctccaccgtccggagaagaaaacacttccctatttctgaaggaaaaaaatccctgttttttttttcctccaaaaataccttttccttccaaagccacagtttgggttcatgtcttaaaagatgtattattttttgcagtattcatgctgacaaaacaataatacatgtggcctcagacgccgcagaagccctgcttgggaaggacgtgaccccgggaaagggcgtgggtgtgaagcacacacatttgagagaggaaaacgtgcagttgtcccgctttgcaaaccaatcggcgacgtttggccatgccagccagtcccccagttggaggtgggtctcggtttacccaggaggcgtggctgccactgcaggcatggctatctgggggttcaagggctcccctgaggacagtcacgttggggctcagtggatcccctcattgtgaagcccttcaggagcgcagctccccgccggggcgttccttagaaaaggctcagaaaacacggaacgttttcccaagaatctccccaaaaaccctggcgatttagctctgcatcacaatgtgcaaatgattaagcaaaaaatgaaaccaatcaccaagaactcaagaactcttccttttccccaccccagccacccccaacctccttgccactgcttcctgagacagcacttctcaaactcggtgccccaggaaccccagcgtggcgacggcatccactcagaacacacaggctctaggaagaaagcacccagcctcccgtcttcctgcgcacacgtgtgtttagacaccgatgtccctgcacgcacccgcaggcagctctccgagcggcgtcacagacacggctagctccagtcacggcagcactcagccgcccgggtaggctgagggctctggacccttccccaagccccaccagcctgcaagactccaagggcgggtggccggcttccaccccagcccccgtgccggtccggctttttagtacacaagcgactttggggtccccaggcacgaagggatgtagtgcaaaggctggactctgtttgctggttaaccacgaacgcgacggtgggacgaggcaggagggagccggctccctgcgcctggcttgaggttctggctgctcagagtctctcccgctgtgaccaccccagctacgatgacacccaggccttcctggcaggcaaagacctcagactcccaccagcaccacccaggcccaagcacagagcccctgcctggagggccccaggagaccttccccaccccagggaaagagcatgaaggaggcagggtcccgcttccccaaacctcccaaggtctcctgttttgaccccagcatgatcgccttgaccaagaggcccctcccgggccggccctgccgcccgattctgcaatgggatcgtcctgtagccacactgaagctccggctgtcgccaccaggcacctgagactcgagagtgaatctctaaccgtgcccgttataatccatgttattttaacagccacatgtggctggcagctcctgtatggggcaacgtggtctgagagccggggagagctggcagggaggcgctgcaggcacagccccccaagacccccaaagctttgtgggggacccgtgcagctgcacctccccctggggtccgcagctggcactgggcttccttcctgccccatcagccacagggagctccacactgcgtgagaaggccctgtgacccgaggtcggacaggcggacaggcccacagtgagctcgagacccacagacactgaccgagacccgacaggacagacatgcaccaaaaacacgcggacacgtgtgcttgagaagaggagggggagcccgaacaggcacgggggagcccgcacaggcatgagggggcagccggtgttgggggctcctcctccagcacgggggcaggaggcagtgagatggggtgtcggacaagacagcacaagtcagaaccgccgtggccaaagagaccccccgggacccccctggggcagcacggcccgagccccgcagcctgcctggctccccacccgaccccaacgtagacgcttcctctgactccagcacagccccagtggtccctacgggaaccgagcccccgccagccgggtcgcctgccaccacgtgcctgtgttctgagccaggatgggggtgggggtctcagcagtgagtgagggtccctgtgtccacaccatccacctgccaagaccagctgacaccagcggggtcctgccatgcggggtgcgggctccacctccaaagggcaggcggaggcacaggtcccaccagactcacagagcccaggtcaggcagcagaggggcgccaggagccgagctccccatcaagcttcgcagagcaggcccctcacccagcagcccagggacgtggcaggcaatgattgcggaacaacttcctaagcacgaccctacactggacaggctgcggctgccccaggccagggaacagagatgccaccccgtgacctgccaggtgagcaccccaggatgggcggggagggtcttcaagggcagagactgctcctcactcccaccgcaccccaggcaccttccagaagccccagacccagcagccccacgtcccccaccacaggcgtcccaggaggagggccggggcgggtgggtgctcgcccgtgggggagggcgtgggaggcacaggcaaggaccccccggacacatggggaagagacgggggaggggtggggagccacagagcttaccggagagcccggaggctcccgcgtgtcctcacctggagttcgccttcagggccagcacctcatccccaaagagagggcagacgagagaggggcccgagaagggcagtaacagggattaaagcacttgggggcagcgggtgtccagatgggtggagtggagggtgggagggagagagagaaagagagaggctgagacgagaacgtggagcgggccgggctggggcagcgagcacgaggggccgtgaggcacggggcgggttccggcgtcgctcccagcaagggcgtggggccctgccacgcggaagccgtcgggaagcctcgcgtccacctgggacagcaccgaggttccgcccaaatcacagccaagggtgcccattgtggggggcacagtgctcatccccacagccactcccagcctcagggccagcagcaggggcgggggaggcagtggcagcactgggggctggcaccagcagaggctacgctgccgacccagctctttctgggccctcgtccgttttcttagcctctttgagaggatgaatgagcccctggtggttttcttggttggtgtgggccggaagcattgcccgtctttccagctcaaggcactgaccatgactccccttctgtgggatgtggggtggctggaaaaatgcagctcagccccactccatctccccgcacccaagccccgcagtgtctcgccagctgtcacccgcagtccaggaggggcagccaggcgtccatctcggaccccaggtccaaggggccagatttactctgcaacatgtggatggggcacagggggcccagagaagcctagcacctcctcagggtgatgtgtcgggggctggggctcagcagacgtagaattaacttgtgaaaggatcttgattttctctgtctccatccttcaccccagcagagcccttacacgagtcctgtctccaatctgcccgacccacagaacctcggggcccgggagagggaaccaggctaagcacctgcacccttggcccactttgaccttggcaaacagggagaggaggccagccagaatctccacccaggggcgtgagacagagaggatgtcccaccctcctcggaggacgaggggccctggtctgtgccacatgctccagacactctggacccagagcagcgggaaggccagaggcccacttggagctttcaccccagccggcgtcgactcaggccagctgtgagctcgggctatgtgcctgcagctggagggagcgcactaacagagaccccctgcctccgagaaccctggggccagacttgtgggcggggtgggggatcccccacccccgagaagccgcccagctgcccggatccacagtgctgcaaagtaaaaccgaatcactggggagggggtgagcaggaagagtgatttaagggcccacatcaccgccaggcgggggtctggacccgcagtcacacagtcacacacggaagcacacacaaggccctcacatctccatgacaggttgcgcacacgtgtgggagagagaccagacggccgtgcacacggcagacaccagggtagcagcagggggcactgaccttggagacggctccggcggggggtccttccttcaaacagaagcaacagagagttagtggccgcccactcagcacccatgagggtcccccaaccagtccagccccccacagtcccatgggtcaggggctgcaggggaggggggtctcagaaaaggctgggcaggggtggagctggcccacccaccccagagagcccacggccccaggaacgggcaccccagggcccacggaggcagctccgagagggaagagggactccatggggcgggggcctctgctcttctgacctgggggtctctacccctccacatttacagacactcattttaatcagaaccacaccaatattaataaagttccaaaaagcacgtgtttgctgaaggaagctctggaagggagtttaatttacaatcaattttcgagacagagtgagctgctccgactcttttttccacgctcatcctaatggaatgattctcttccgcgtgactttccaggggtggctccactgcgccacagtcagtgagcccagggtttgcaccgctgaccaactgtcccggcctcgtcctgcaggcaaagctgtctgggccttccggcgtctcatctggggctgtttccgcgggtaaaggcgttatggattgagtgagagatcggcggatcgtgatttggctcatccatggggaggccccagcgatctcattcgaacacctgggctggtgccccggctggtacgccgtgttacaagcaggctctttggtgcacttccaaatacttcatgtgacagggaccgtgttgccgtggaacatggtccacgctctcggggagggtccctcatcacctcctgcagctcccggtggcccaggtgtccttggcttgtggctgcaccgccccgtctctgcctccgtctctacacgacattctctgtgtctctgtgtcttctcctcctctacctctgtaaggacagctgtcaccgggctagggctcaagctgtcaccaggctcatcaggatgttccaggatgacctcatctcaagatcccaagctcagttacagctgcaaggaccctttctccaaatcaggtcacatttgcaaattctgggacattttggagaccagcattcaaccactgcattcccccgaccccccaaaattcatgtccatcttacatcgagaatacactcacccctgccaagatcccccaaaatctccaccctctgcagcatggactgtgtgtccaaaacctcatcgaaatcccatccgttggccaggcacagtggctcacacctgtaatcccagcactttgggaggccgaggcgggtggatcacctgaggtcaggagttcgagaccagcctgaccaacatggtgaaaccccgtctctactaaaaatacaaaaattagccgggtgtggtggcaggtgcctgtaatcccaggtactcgggaggttgagggaggagaatcacttgaacccaggaggcagaggttgcagtaagctgtgattgcgccactgcactccagcctgagtgacgcagggagactccgtctcagagaaaaaaaaaagaaatcccacccattcaaaacgtcccaaatcccatcctctgaagtcatgacaatcacttaaatcaggtatgtgtgagaccgtgggtgtgcgccaacctggggctaaagtcctccatgcatgggcttgtgaactagaaaacaagccatctgcttaaagtatcaacagcaggacagctcttcccactcaaaaagggagaatgacagaggggccgccggccaccacgtttccaatccggcggggcaaactccacgtggcacagctctggggacgctcctcgggggctctcagccccgccggcctctgcgggagcctcgggatcgttccccgtttcctaaagggcagctcgtgttcacagctgaggagcgccaccggcctgtttcctgcctgcagactcccgaagttcgatgccctcttaccttcgtccaacgctgtctctgccaatctagtttctgctggtatgaaactccccaaaacctctagggcctcctgaatatgccacaggccgcaacgccgttagacaagaggcccctctgcacatccttcccgatagctccatcttcaggcctctgtggagacggtggaggctgcagccgcacacctggtgccttcagcatgaggctgtctggccacacctgtgggcttctctccaaagcaggctttgccaacagtgaatctcctaatttaagaccctttgcaagctggacaggctgagcacctcccaaaccttcaagttctggtttcttacagcagttctgccctgaatgcctttttttttttttttaatagtcttttggcggatcggccaggtgctgctctgaatctccctgtttcctctcatactttactatgagcagcagaaataaattaggctgcaccttccacactttgcttggaaatcttcttggctaaatatcccagttcatcacttaaaaattctgcctctgcccaacagtagcgcacagcccagtggagtctctgccaccaacaacacaaggacagccttccctccagcttccaacacctgcatcctcacttcctcctgagcccgcaccagaagcaccttcaacatccgtgtccccacccaccatctcttcaggacacctcagtttcttccagcctgcacctcaaaatactcacgtccaaaatctcatccaaatcccatcagttcaaaaagtcccaaatttcatcatctgaagtcatcagaggccgggcacagtggctcacgcctgtaatcccagcactttgggaggccgagacgggcagagcccttgaggtcaggagcttcagaccagcctggccaacatggtgaaaccccatctctaccaaaaataacaaaacttagccgggcgtagtagcaggtgtctgtaatcccagctactcaggaggctgaggcaggagaatcacttgtacccgggaagtggaggttgcagtgagccaagatcgcaccactgcattccagcctgggcgaaagagcaagactccatctcaaaataataataataaataaaataataaagtcatcagaatcatttaaatcaggtgtgtgtgattgcaggtgtgcatcagcctggggctggagtcctccacgcatgaacctgtgattctaggaaacgagcccttggctcacccggttctgatgtcacacccgcgcttgtaggcgtttgccacagccgcacgcggctcccggtattaaagtctggattcatgtgcaacggctcctgtaactaagtgccgctggagtgtgtaacaacagatgtttgttctttcacagtcctagacgccagagtccaaaatcaaggtgcgggcggggcctgctccctccgaaagctccagggaagggtcctttctgcctcttccagcttctgtggctccaggcagcccttggcttgtggccgcatcacttcagtctctctctccatcctagctggctatcacctctgtgtgcttccaaatctccctctccttgtaaggacactcgttgttggactcagggcccgcccggaaaatccaggatgatctgagatcgtcctgataggttccagagcagaagagtgtctctaggaggcagaaaccagcatccaacccactggaagcccctgccccaccaagggctttcagacatggaactgcttggggacggctctgggcctgggcaggcctggcaggtgcattcgccttccacctctcctgctcagcaggcccttctgcaacctacctcgacagccggcactctgacagccgtgggctttgggcctgaaggagaggcagcaggcgccatcagcacctgagttaccaccaggcactcgagaggacgacgggctgggacactttgtcgtacgacccacgcgcctgggccccattaggagccatgcagagcccccggccccatatcaaccttcgcccctccctctctgcccgtcccccgaaccagctgcccctctgggggtgggagcccagaccaggtcagcagacgcgaaaagagaaagcaccaccatcaccaagtccagcgtccccgcgcgtcccagctccctggagtccctggggcactgtcctggcgtgtcttctgtgggcagctggggcccccaggaggactgagacgcccacccgccccacctggagctccccagctgacctgaaagcgagtccagatttactcttgaggttcctcagcagctccagctggttcagcggggggataagtctggggcaagagaaggagaggggagtgagcgtctcaccctcccgagtcctgggacacctccctctgcttgcacagctccatgggcaggcgcctgcagtgtcagacacccggcggcatgtgacgtggccaggctttcaggcagctgcccactgggccctgggctcaggcccacctctcttgggcaggcctgggagccatcttcattctctggctgtgcctggggccttgtcaaccagcagggacagcagggaggagggaagagggcgcctggccacccatgcagccccgaccctgcagcctggagcaggtggaggagggcgcgcaggtagggggaggcgctactcccccttctaatccctgaacatcctagagggacagcacgcgaatatatttagggccccggcccctctctacacagccactttctctgccaaagctggaggagttgggaggtggggatacagaaaaggattctgcttggcaaagagcagctcattctggagtctataggatgagcccagcctcatcaggcccagatgccttgggaatcctccgcaggtggcccagctctgctccgagcccccttcccagtcctggtcatacccacccctgtcttcctgccctgccgcccacagccaccagcaggaccaagtccgggcccgccgaagccccccaggcaggtatgcaggcacctcctcacgtctgggtgggacgtccccctcttcacccctccccactcccacccacctcactctgcccactcctcctcaccacccatgccctcacagcattccagctcgcttcaggaagagacaccctcctctggggcctcccccacccggctccctgacccacctgaaccccctccactccgcctcctcagcctctgctcccaggccctgccatcccatccacggcctccacccctccccacacccacctgtggagcactccccactggggccacgtcctggtctctcctctgcgttggaggcaggacggccacctcccagcccagccctcacccagctgactccctacgcggctatggccacggccaccccctggagatgcccctgcccgtgtcctccctctgccccaggctgggccgtggcccacatcctccagactcttcacctgccctgcctctgcccacccaggcttacttggtcctccagatgggcatccttgccactctcctgaccaaacactcaatggctccccactgcctccaaagcaaaaggatggctgactccattgtccctcagggcttggtgatcaccctactgccgactcccacttcgtccagccacactcctccctccagagctgtccagaagcccctccctgcaccccaccagcctctggtgcccccccacaggctaggcaggtgtgagctggtaaagccgtgcctggcccctctttgttccctctgcagccccagaggtgcccccaaaatgctggcaggagtggggctcctgtgagccccctccctgcagaggacagtccgctgtccaagtcgggatggagcaggaaccaggcagctggtgagctggtgttgtgggcgcagcagagcccagcctggccggagtctgtctgggggccacaggtggctccccacccctccttgatgggacccacacgcacgcaggcccaggtgagagacacacacgtcagccctcagagccacataggaggccatgcctcgaacacacagagcagcagcgccagggcagacaggcgggcggcagggccagggcaggacggagctgtgggacgagggtgcaacaaggggagggggcggccctgggagagagcagaggctggggaggaggcagccggcttcagcgccagcctcctggccccaggggcagcagggcctctgcagacattggagatgtcttatggctgagcatgtcgggggcagaggagccctggacccaccactgcccagcactgcacccacttcctttctgggaatggagagtcaacattctaacagttcccaggaagggcagccaggtctctcctccaggacgggtgactggcccctggaggagtcatcaagggcttctgtgcaggaagcccttctggtctatgtggggagtggctggccccaggctctgcagggcagtgtcatcacagagcacaagcctgcccacccgacaggtaaaggccctttgtgctgtatgggggtgaggcttcccatagcagctcagcgctctccagtctgaacaaacagccttgtttcctgctctcagcagtggggacaggggtgggacggcctggagccctggggttcccctgtgatgccagggcaagactcaggagaaacttgagtccagggcaggagaccctgaggcagacccctgaggctagctggcccgcagaggctgccctgtgagccacggtgggacaaggactgtggctggtctgggggtcctggcctgggagcacccttggccccagatgggtgcccagcgccagggcaggggaagccccccatccatcattcctgctctgctcacagatggggcctgtggggtggggatggaggcacgaggggagccaggccagaagcaggacagaacgagaccacgggggacacaggcgggctggcaacaggaagcagcggctggggggaggcaggacgagaagggtggatgggccctgggagggcagggttggcacgtgggctccaggcaggggagggcccagggtgatctggccgcccagcatggggccacgcagggcagggggcatagggatgctcggtgggcagggacagtggtcactctgcagaccgggtgggccacggggctccaggggcttgcccggtcacagttccagacacagaactagaaccacacacacacacagggcttctgtccatgcatttcctacctggaggccccgtaggtttgagtttgcgaactttcaagtgtttccacacacacaaagggaaaagaacggaaaatttcaaaaagaacgggataagaaaaagaaaatgaaacaaatagttgaggaaagtaggggaaacaacagaacaaagaaaattagcacaagggctggttctgtccctgccctgggctgagagaggtcactttgcagaaacaagggcatggccgacattcccaggaaagacaagcagggccaggctcctaaggtcgggcttccaggaggtgcaggggggatggtgctgagggaggggttggggcagaccccagagggcgactgcaaacatcgaggaccgccaagggctctggcatcctcctcccaagtgacaccctgaaaaggcaggtagcaactgaggactgccgcgggtctgtccaccctggccaactcaggatcctcaagaagaatcctgggccccaccccagcttagaattcccagccacactgtgcacctgccccaccctcagggaaggccccaccctcagggaaagccccgcccacagggaaggccccaccctcagggaaggccccaccctcagggaaggctccaccctcagggtaggatccacccacagggaaggccccacccgcagggaaggccccaccctcagggaaggccccatccacagggaaggctccaccctcagggaaggatccacccacagggaagactccacccacagggaaggccccacccacagggaaggccccaccctcagggaaggccccaccctcagggaaggatccacccacagggaaggccccaccctcagggaaggccacacccacagggaaggctccaccctctgggaaggatccacccacagggaaggctccacccacagggaaggatccacccacagggaaggccccagcctctgggaagtccccaccctcagggaaggctccacccacagagaaggctccaccctctgggaaggctccaccctcagggaaggatccacccacagggaaggctccaccctctgggaaggccccacccacagggaaggccccaccctcagggaaggccccaccctcagggaaggatccacccacagggaaggctccacccacagggaaggctccaccctctgggaaggctccaccctcagggaaggatccacccacagggaaggctccaccctctgggaaggccccaccctcagggaaggctccaccctcagggaaggatccacccacagggaaggctccacccacagggaaggctccaccctctgggaaggccccaccctcagggaaggatccacccacagagaaggccccaccctcagggaaggccccaccctctgggaaggccccaccctcagggaaggctccaccctcagggaaggctccacccacagggaaggctccaccctcagggaaggccccaccctcagggaaggccccaccctcagggaaggctccaccctctgggaaggccccacccccagggaaggatccaccctcagggaaggctccacccacagggaaggccccacccttagggaaggctccaggggacagaaaccccctaggagcaggtgacggggggcgcgggagctgggaagtcccggggctcagttccccacctcagagcagagggcgggcgggcaaggtggtgcccacacagacggactcgaggggtcaggcccgcgtggaccaggagaaaggccctcagaacccctcatctcagaccttaatttaagcaagagccaggcaacgaaaatcccagctggctgccacctgcccttttgtaaaacaaaaaaacacgggaaagccgccctccgaccacacaggctcacaggacctgctagcactgcctcgacaggcactttctaggcccccttctctgctgcccgaggggctccaaggttgtctgtgtgctctgtcctgttggggaacacctgggacccccaggataatttgagtttcctggtctgaaagtctcactgtgatccggggttactttcctgccccccacgccggagccctaggtccttgatgggggacggggtcatggtactggttccactcttgaagcttgggcacctcgagctgccggtccagagcagcccggggagcagctgtcggtccagagcagcccggggcggggggcatttaccttgagctccctggggagcgtccttgcaacgcacaaaacacagcacgacccacggccaggacgataaagcaaaggggtgaggaaatgaaagtgaagagaaagccgcagctctaacacaaagggcagaagcaacgcctcgaaataaaccacacacagaactcctttgtgaaaaatacattttaaagaaaaaaaatcaatcaaaataatgaacaacaaaaagtggggtttaagaacaaatggaaaataaaaaatgaaacagttgcttggtggcaggtgcccggcggcggtacctgtacatgggcacggtgaccgttcgctcgtagtactgccacgtggagtgcaggtctgtgcgcgagaggttggtggcgtagaatctccaggccgactgcggagggaaagacaaggcagttggcgaggggcaggcggcgaggggcgcgcccaggagggccgggcgtggagggaacggggcagaggggacccccatgctgtaggccaggcactcaggactctgggccagcaggccaggccccagtgctgcatcagccccacagcctcagtttaccctctgtaggacagacaggcaagcccgcttgtcagacggtggggcctgaaggaggggagcggttggggcttgactcggggccctgagcgagctcgcagggaggctgtgttctttccttttcatgactcttacctggcccctggcgggtatcacctgtcctgggggttaccttcctgacctcctggttgggccctgggcaacctgaggcgctgggagtatgggtagggccagggacctcagcctccaacctcccagggcggggactcagcccggctcggggcatgagcctgtacgtcagactgaacctcgcctggctggatttccgttctctatgcctttgttttgttttgcggtgctgaaatagacatatcctgaagttcaccatgttagccatgttaaagcgtgcacttcagtagcgcctgcacacacagtgctgtgcgaccactgcccctatctaactccacacctcttcgtcgcccccaaataaaccccctcctacccccgacgttcagcaggcgctcctggttcctggtcccccaggccctggccaccgccagggtgtacggggctccacggacttccccgccccgggcatttcctgccaagggcatcgcaagctgcacggccttccccgtctggctccctccactgagcgtgacgtccccgcggcccatccgcgtcgtagcaaggggcagcgcccgctcctcctgataggaggatcgtatggataaatcacattccgttcatccattaatagacatttcagctgtttccactttttggttcctatgagtggtgctgctgtgaaatttgtgtgcacgtttttggttgaaggtctgttttcaattcttttgtgtctgtctatacctagaggtagaatggccgggtcacgtgacaactccacgtttacgaactttctgagaaacaaccgaactgctttccagggtgactgcatcgctacattcctaccagcagggggggcggtgtccacacatcctcactacgctgatttgccatttgctaacatgtcagccgccctggcctggcgcagaggctcacaacaccttggaggctgaagcaggtggatcgcctgagcccaggagttcaagcccagcctgggaaacatggcaaaaccctgcctttacttaaaacaaaaaattagccagatatggtggtgcacacctgtagtcccagttactcaggaggctaaggtgggaggatcgcttgaacctggcaggtcgaggctgcagtgagccaagatcacacaactgcactccagcctgggcaagagagcaagtccctatctcaacaacaacaaaaaaaaaaagttggccatcctaacgtggagcctgaagacgggactgaactgctgccatctcaggataaaactctaacaggtgaggagcagcatttatggatgagcaaagtaagtggtttcttgggatggacggtgaacactgcagacagcagggtaaggtcacttctgtcaggtccaaaccaaccgaggccagagagtacacggcggcagggctcacgcctgcatggctgagatgaggacagtgtcaaagacattctaaaataaccccacaaggaattccttatcaggaatgcagcaattcagacaagatgctctaggaagaacactggcccagcagcggcatctcaaccagtgaacggctgccaactctggttttcagcctcagagccagtgaactctgtttccaagcagcttatgtgaacttctcagccagggagagcttccctgcccctccctctccggcacatgggtggctcgccacactggctcatctctcgagagtcccccaccctctggccacagtggttcatctctggttataatcctttcttctaattcccaaatacatttgacatgtgtgtggtttctttttttttttttttggtcgacagaatctactccaggcaaagatgttgtgaactgtgttgaaatgacaaggaatgagaacattatataaacttagttgatacagcagtggcagcatttgagaggactgactgcgatgctgaaaggaggtccactgggtaaaacgctatccaacagaatcgcatgctgcagagaaatctttcgtgaaaggaagagtgaatcgatgcggcaaacctcattcttgccttattttaagaaatcaccacagccgggcgcagtggctcacgcctgtaatcccagcactttgggaggccaaggcgggaggatcacgaagtcaggagatcgagaccatcctggctaacacggtgaaaccccgtctctactaaaaatacaaaaaattagccaggcgtggtggtgggtgcctgtagtcccagctacctgggaggctgaggcaggagaatggcaggaaccagggaggtggagcttgcagtgagctgagatcgcaccactgcactccagcctgggcaacagagcgagactccgtctcaaaaaaaaaaaaaaaatcgccacagccccagccttcagcagccccacctcatcagcagtggccaccagcatcgaggtgagaccccctaccagcacaaagattgcaactcgcagaaggctcaggtgattgttagtatttttttagcaattaagtatttgtaagtgaaagtacgtgcagtgttttactgttttttagacataatgctactgcacacttagtaagctatggcatggtataaacataactttttttttttttttttttgagacggagtctcgggctgtttcccaggctggaatgcagtggcgcaatctcggctcactgcaacctccgtctcccgggttcaagtgattctcctgcctcagcctcctgagtagctgggattacaggcgtgtgccaccacgcccagctaatttttttgtatttttagtagagatggggtttcaccatgttggctaagctggtctcgaactcctgacctcaagagatctgcctgcctcagcctcctaaagtgctgggattacaggtgggagccacggtgcccagcctgtaaacataacttccatatgcactgggaaaccacgaaatttgtgtgactcgctttattgccgtatctctaccgtagtggtctggaaccacggctgcaggtcctctgaggtgcgcctgtggagaggcccagctgtgctctggaaatgtgcaccagctgctaagagtgaccttcgagggaagcagggcgcatgggaccctgggtgctcagacgctgctttttctggcactattgtaaccttttcaccacacgtacgtggtcactttttaaaccgtcaatagtggagtgagatttgggggcattttggttcttcttaaaactcttgcctggaaataaatagctgtttgtagtttttatagtggaagataaatacacaccttaaggtaggctggacccagagccaagaccacaagaggcacatcccctgcagtggccactgacactccgcggcttgtggccacgtctccagtctccgcctttgtggtcacactgctttcccctcctctgtgtcaaatctccttcttataaggatgcatgtgattgcatttagggcccacctggggtaacccaggattatctccatctcaagatttgctgtctaagacaggagagagcctatagccacattccgctggcagggatcctggtcagctctgcgggtccagtggatggaagactttggggaggagctgcaagaatggctggtcccaagggggtcctgctgtctgtccatattttctctttttttttgagacggagtctcgctctgtcacccaggctggagtgctgtggcgtgatctcggctcactgcaacctccgcctccctggttcaagcgattctcctgcttcagcctcccgagtagctgggattacagacgcacgccaccacgcccagctaatttttgtatttttaggagagacagggtttcaccatgttggccaggctggtcttgatttcctgacctcgtgatcctcccacctcggcctcccaaagtgctgggattgcaggcgtgagccactgtgcccggccattgtctgtccgtattttcaaggtggctcaggaattacttgtggatgccacagtggtcactgcacgctacccacccccaaatggtgggacggcactgggtggggtccgggcgggcatcatgggggcccacagccagcatcaggggtcagacgaggtcaggcactgactcactgcagtgtgtgggctctaggagccttggccctgcagctgcagaacgggtgtgctcacctcccagggtgcggtagagaggacctgatggccgggccccagcacccacacaaggcaagggccaccccagcgtcctcacacgagccacccctgtgcagcctcaggggttggagccatttctcaacacacacacttcacatcctcgctccttccacagattcctgcagagggtgagcgctgtggcccatccacagacagggcaatgccaaagccccagcggcctccactcctcaacaaggtgggaccaggacaagggctgtgctggtccccgggggacacctggactcacctggatcaggcctgctgccgggttccgcctcttctcaaagtgcttctgcctgtgctgctcctgaaccttcagggcaaacccagaccccaagatgccctgcaattcatcagggtcaggtcacaccccagggaccccccacaccccaattcatcagggtcagaccatgctctggggccccacaccccccccaattcatcagggtcagaccacactccagagactcacacaccccccaattcatcagggtcagaccacgccccagggactcacacaccccccagttcatcagggtcagacccgtctccaccgatccatgcctcccccaccttcatcaaggtcagactaatccaggaacccatatccccacaatttgtcagcatcaagaggaaggaaccctctggcttgcaggagacatggcaggacccacactgaactcagagtggcctctttcccttccacacagaagagtctgcaggcccatcttgaagggcacacagtgaaggggacaccggggccagcctcttgccgtgcaccagctgccctgccctgccctgccctggggcaacaagggttgacagggcccctccacctccctctgagctgggtgggcctcactgcctagagacccatgagggacctgtgtcaccagccgccctgctcctggtcacaaggacctcctgctcagccccactcagactaagaggggccaccagtgactaacagagccccctgaagctacagccgcagccttgggcatgctcctgtcggggctggggaacccccactccagtccttggggaacaaggcctctgaccctgagctgccacctccagctcctgggggctgtggacctgctgagagctgctcctgccccaggtcccacctagggaactgtgcccaggggcctgtggtcacctcgggagcctacaagacctcgtccccctccaaggcaggcaggggcagctggacttactgcaggcagcgcgaagaaggagacaccgatgagggtgaaggttgccgcaaggagcctgccgttccaggtctgggggtacttgtccccgtagccaatggtggtcagcgtgatctgtgggaccgcaggctctagtcacacgaagggcctgctcacacccctgagggcaggctggacgcccgctggcgactcggggcttgggatgggacagatgcggggccacccccgtgtcaccatccacacggaggcccagtgaggccagggtcggtgtcggccgcccctcatcccctgagccctctctcctcttcccctacaggccagaagcggggtccagccaaaggctgtgtccccatctcacatcgagaaccagaggcccagcgacgtgactcccacgaggctcggctaggacagcagcccccactgcatccccgccaggtgaagagtgcagctggggagaagggagtgcccagagggacccagaggaacgggcagggcgtgcagggggctcgctgagcctgagctgagctgaggccagaggagaggggtgggcaggaggaggccaccacaagaggcgggggagtggtctccaccgagccatggcggggtgggctgctcctggagcagggaccccaggggttgtgcttagtttctctaggggtggtgggcaagggggaggtcaggccaggttggacctccccaagggtcccggtgagcccaggagcacccgactcggggcctggatgaggggaagcgaaggacggacacgtctccaagcagctccgacaagagatgcctgtgccggggccgaggaaggcaggggcaggcaccctgcactcagtgctggacatgttggggccgcagcccacccccgcctgccagaaccgcacgcaccacaagccacgggctcaggacagccgcacggaggccactctggctaggaccagaaggtgggcccaggacaggccctgtgagggcagagtcttagataaacagacagagggatcgaggcctgagcgcagacagcagggccgggaaggggagacctctcaccaggacctgcagccccaccttggggagtttaccctgggttccgaggacgctgctgtgtggtctgaggacagggtgggccggctgggccgcacctgctccacaccgacaggaagctgtggcctggtgcaaagcagcgccagcacctgggggccttggctgccaccaccacgcggagcgcacaggagactctgggaaggaggctgccacacagagtgggcgggaggctgggcgaggcctgaccaagaaacctctcctggggagactaagccagggcctcagccctctacacaatttcgttaccaaaggaggcgtggttttttgtttgtttgtttgtttgttttgagacagagtctcgctctgtcccccaggctggagtgcagtggcgtgatcccggctcactgcaagctccgcctcccaggttcacgccattctcctgcctcagcctcccgagtagctgggactacaggcgcccgccaccacacccggctaattttttgtattcaaggaaaaggaagccggaggcctggcagatggggcctggcctgcgggggaggtgagggcggggttccccccacactgctgaaaacccccaaaggctgcaagaaagggaaactgggggtagatctcatcccagtaggaggtacacagtcagcgcgtttgaatcaggaaataccagcatccctatttgctatttaagactaatcaggtaaaccccaaagaaaaacacagaagcagccgcatccgctgcagagggacccagaggggagggcaccgcggccacagagtggggctctattctcaccataaggcttagtaactctctgacatttaaaaatatacacaagcattactctgaaaaaacacccaatcgtaaagataagaaggctgttgcccacaaaagacctgggggatgggcttgtccccatcaaaagtcctagggcccagcagtcacagctcaggacgccccgggccccaccctgaccctgtggtggggcctgaaccacacaagatggctcagtgagtccaggtcatctgtatggtccacagcctgggccccggggcacgctcagctctcaacccccacccaagccccgactgggaagacagtgtccaggtctcatgaaattaataaaataacttcggatcagctgcatccggcttaggcaccaggtggagctgcccatgccttccccgcagggctgagcccactcagccggcatgtgcggggctaggcccggggtctggtctcagcctcccaggagagcacagaccctgcccctgtgcaccagcagcctgagggtgtctgtggccccaggtgaggaggagcccaggggccagatctgttcagacctgatcagagtggggcctgcagagccacctagtctccaaaaactcagggctgcccaggacagatctcctagggatgcctcttctcccctttcccccaataatcgggacacggagcaggtggagggtcactcaggaggaaggaagatgcccaccacggctgagctcaggaggaaggaagatgcccaccacggctgagctcaggctctctggggcccagccctccccacccactcccccgccagcttggcaaccaccaccccgcctcgaccacaagccatcatgaccacgggcagccagcaggtggccccaaagagatgtatggagcaggctcagccagtgagagcctggtcccagcacagggacaggggtgtatcagcagggaaagggaaaaccacaatgaccacaactcaccaggccccaccagagtgcatccgcgtaggtgtcaaagtggtcgttctcccccttctctgccaagtacaccaggaacgaggccaggatgagacaaaggaagccgatgtaccaggcagtgaccagctcctgagaggcagacggcaccaccatcatgaccaccatcaccagaagcatcaccatcaccaccaccaacaccaccaccatcacatcaacaccatgaccaccatcaccaccaccaaaaccatcaccaccaccatcaccaccaccaccaccaccaccatcaccatcaccaccatcaccatcaccaccaccaccaccatcatcaccacctccaccatcaccaccatcaccatcaccaccatcaccatcaccaccaccaccatcaccattaccaccaccattaccaccaccatcaccatcaccatcaccaccaccaccatcaccatcaccaccaccatcaccatcaccattatcaccaccaccatcaccaccatcaccaccaccatcaccatcaccaccatcaccatcaccaccaccatcaccatcatcaccatcaccaccaccaccaccatcaccaccattaccatcaccatcaccaccatcaccatcaccaccaccatcacatcaccaccaccatcaccatcatcagcatcaccatcaccattatcaccaccaccaccattatcaccaccatcaccatcaccaccaccactatcaccaccaccaccatcatcaccaccaccatcaccggcgccaccaccatcacatcaccatcaccatcaccaccaccaccaccatcaccaccaccaccatgatcaccaccatcaccatcaccaccatcacatcaccatcgccaccatcatcaccaccatcaccatcaccatcatcaccaccaccatcaccatcatcaccaccaccaccatcaccatcaccaccatcaccaccaccaccaccatcaccatcatcaccaccatcatcaccaccaccatcaccatcaccaccatcaccatcaccaccatcatcaccatcaccatcaccaccaccatcaccatcaccaccatcaccaccatcatcaccaccaccatcaccatcaccaccaccacgatcaccaccatcaccatcaccaccaccaccaccatgaccatcatgaccatcaccaccaccaccaccatcactaccaccatcaccaccatcaccctcaccaccatcaccacccgccacctgcctccaggagcactgcagcctcgccagtcagcccactttgggctctgtctccagggatataggggctggatggacccgtctcctgaggccagcagaggctccacgccagggtcggtggcagggctggcacaggggaaccaggaggcgccgctggcttcaccatcttagctacggcagcccattcccctgagcctcctggcctgggcaacagtggctcgcacggccagcccaccgtgccctccagggtcagtagcgtctattctggcggccagcagggctggagaatcttgggactgttgagaccctcccccaacctccctgagcctccgggcacagatgtgaaaagggtgcccactgcagtcagcactcaacccccacagcgtccagggagggagaggggccaccgggggctgacccctgcccattctgcagacaaagccaccaccctgccagggctcaagagggaagaaaatggggagggggccatttgagcaaatgagcccacccgtgagcaaggtggagggacagcacagtctggcaggatggggtctcggtcactggggggcctggggcccctggaactcagcatgtgtggccacagccaccctctgggtcccccggacagcggccgccgcaagccgcagcttaaacaaccaccaggcaggtgactagcactttgtattgatccaggcactaaaaacccaggaaagaagacacccaaccacagagccaagggttcgcggcaggaaggtgggggtggcaggggccaaaatggcctggcctggcctttcgaaaaagcagctttctggagacagatgacaaagatggcccaagtcacgagaagaagcaccgagaagaaaggggagggaggctcgttcacacctgatgggctccagccagagccaccactgactccatccctccacccagggctcttgaagcaaaccccaggcaggggtggggcccggtctgggccaggactctcgctggctgggggcgcccaccgccagccttggggccgtgactcaccttgctgtgggcatagaccacagagcccagcagcttccaggtgcctccccgccggtccatgcggatcatccgcagaatctgcaggaagcgcaggctccggagcgcagatgtggcaaagacgttgccctgggagccggcggccagcaccgcaatggaggcgatgagcaccatgatgtctacaaagcgggcgtggagctggtgagctgctgggccgctccccgcacccccttggagaaaactccccaccccgcgttccaggaggatgtgcagaggggcgggaaggtgtatgcccagcgcctggtgtgggctctgtcaggccccaggaaggacattactatcgtccaccctgcctgtggggcccaggatgggcagcccagcgccacattcctcttcctgacatttaggcagagttaaccacagcctctgactccaagtcagcaggtgaaaagaaacttccagaaggagccagtcctgcccagcctctctggcccacgcagacgccccagctccccccagggctgagtccgtccctgggtgcctggccctgattctagcaataccacccccaccaggcctcaccaatcacacagaacggtttccgggcaaacttgagccgccccctccagccacggtaccggcagcagcagcctgcggcccagatccgcacgaagtactccacgccaaacaccacgatagtcacgatttcctgcaggggaggaaagctgaggccaccttgaggcctgggggagggcctgggggcccagcctggacacccacaggagcagttctggcccagggaccaagccacagggcaggaggcccccaaaggaaactgcaagctgacccccccacccctctccagcctctgggcaggaagggttgggccctctggagaccctgcatccgggaacacagctgagcatgaacaccatggggccaccctccccacctccctgtctgagctggggactctatctgggctaggggaccatgtctgagctggcagggctgccctgtctgagctagggggttctatctgggctagggaaccctgtctgagctgggaggccctgtctgagctgggaggccctgtctgagctgggggaccctgtctgagctgggggaccctgtctgagctgggaggccctgtctgagctgggggaccctgtctgagctgggaggccctgtctgagctgggggaccctgtctgagctgggggaccctgtctgagctgggaggccctgtctgagctgggggaccctgtctgagctgggggaccctgtctgagctgggaggccctgtctgagctgggggaccctgtctgagctgggggaccctgtctgagctgggggaccctgtctgagctggttggggagctgccctgtccaagctgggggactctatctgagttgggggcccctgtctgagctgggggaccctgtctgagccagtgggggacctgccttgagttggggggtgcacagcagggctgagctgagggaaggccccaggtaactgcaaagggggccacagtctccacccagaccttgggaagccccagaacagaggagcagggcgggcagtagagggaggtgcatttggatggggaccagtctccttgagggccccccaccccgttaccaacagcaacacaggaactgcactcccgttgccatggcgcccaccctgccctggcacagggttgctgcaagcgtcacagcccccaccccgacgcccacgtctgccgtctgctggggacgccccacatctccggctccagagataaagtggggatgggaaagggagggtggcccacccagggtgggggcgatggaggcggggctgtcagccactgtgaggtcaccaggaggggtgaggtgagggctgagttacagccagggtggggctggggcatagcccgggctgtggggctgggggcagatgggaactgacagggcacaaagacatggccagagctggggctgggggcgtcagaggccctgtagtaacaggaacggaagacagacgcccaggcagctccagctccttcctgggcacttccagcccccgccctccctcggggctcaccaggatgtagagggccccctccgagctcttctcatactccttgatggtggaaaacacagacagcacgaggcaggagaaaaccaggaggaacctgggggcagggaacgcgcgctctcagacaggccgcagcagggcagcagcatggctgtgtctccagaactcaggaccccactccccaccaggccgcagcagggcaccagcatggccgcgtctccagaacgcaggaccccactccccacccaccccaccagagctcgctcgggccagagggcacccccatagccacctcccgggaccctgaactccacagtggcagctgccccctctatgcgcagctgccccctccaggacgcacccccctctccactctggcccctgccccttctgtctggtttcagcctggcagcctcatcctttggcaacgtctccaaaactctcagtcaaatgggaacagcaaggcctgcccatcaactgctacaaacacaggaacaagcaaaacccctggggcagaaggcaccgatcagccttcccctctcctcactctcggccacctcctccagaccccaacgcagagggcttctctctgccagttaaacccggagccaagcaacaggagctcctcggatcaccttctttccagcctcgtcctggctgccaggaggctccgtttctccttcctcccgggttgcaggcacctcctcccgccagtgacttccaccatgattgctcttcccattcacgtcccacgcgattacctcactcactgatccttcttcaatttcccctcagatgctcaagttcacaccccaccaaaattcccccaaatgcatgtgggtatttttgtttttgtttgttttgttttgttttgagatacagtttcacttgtcgcgcaggctggagtgcaatggcgtgatcttggctcgctgcaacctccgcctcccgggttcaagcaattctcccgcctcagcctccagagttgctgggattacaggcatgtgccaccacaccaggctaatttttgtatttttttagtggagatggggtttcatcacattggccaggctagtctcgaacacctgggctcaagtgatgctcccgcctcggccccccaaagggctgggattacagtcatgagctaccatgctcggcccaaatgcgtgactttttctcagccctgcattctcctctgatacaagcgactctgctacacttgctcccttgcccaccccaggaagctgcagacaggaggagcccgctagcccccgaagaccctgccgcgggaacccggcttgtggctgcaacaaggccacccacatagaagagacatagaagatctcccagctcttcctgggagcaaagctgtgcaacccagagcctcaagctgccgctttggcaggaaagccaactcccgcgtgctgaagtcactgaatgcacaccagagagaaacccacttcgcaggaagcaaatgctttgtctcatttacatttttcgcaggtgttctgggatgtgaaggggacgtgtccaacgtccaggtccttcgtcacagccataaaggaggccatgcgtgggacacgccctcattccaggcaatgtgagagacgccttcaccttgaccgtgttgctgcctctcgttccaaccgtgctcagaaccaggagccggcggggacggagccacagagcagccgcttccccgtgtccgcgcccctgtactgtcttcacactcgccatcaccttgcacaccctgcggcaccacacgaccgccacggagcctgtggggccctcctgtgtctcaaacccgagcccttccccggcgcccacatccaggtgggtgtcaagggagggagattccccacactcaggatctccttccctctgtccccaaagcagtgctgcagtccagcctgggttccgggcagtgtccccgctcccctctccccactcccacagaggaaatattccctggatgccccgacctgcagggccgagactgggcacaggcacgggcatcctgggggaagtccctccagcccggatacgcccacccctgacctgctgggccggggcactggccacaggcatgggcatcctgggggggagtctctccagactggtcacgccccctcatcattggagcttcggagcatcacagcacctgtctagacccacccctcctgtctcagccttgcaatttcctttccagtctgggggtgcagggatgctcatgggatcgaggctggccaaccacggccagcgagtggtggccccagaatctctgctggaactaccaggaataagacacccccttcccacaaaggttgccaactaggaggaggcaggcctggggcactggcaggaggacgggtgggcacaggaaaacctgcctgaagatgaggtcatgaggaaggcagcacagaaggatgggagaagaggccttaagacacataatgtgagcacctggatccagctgtgcctgaagccccttggacttccaggttatgtaagcccattccttacaaccctttgcatttgttttctgccccttgcaaataaaagaccatgacctttcacgctatgagcagctgacatcggtgtgtccctgctgcgagcccacgcctgactccaccatgctgtggccacatgctactctgacccacagctcctccctgggcagacaagccacgcggctgtgacacaagctgccacggatcaaaaaggaaaaaacaagtcctcgatgtgcggagctatttagtgagcacaggtcagcgttggccgcagtgcctggagggtctggagggtttggggagcagaggtcagcattggctgtggtgcctggtgggaagaggaccccactctgctcacggcttcactgtcttgtgggagagcccctggggagcaccgcagagagaggagggactcaccaaaggccgagctccacagcccgggagaagagggaaaagccccagcgtctgagctcctgggagaagagggaagagggaagccccagtgtctgcggcctgcagggagacttctcagacttttggccgcggaggcagaaggacagggccaggccatccgggcacaaacccggggcccccatcaccccaggctcaggctctgagcccccaaaccaggaccagcccactgggtggtggcagcaattggagcacgtaattgggcccacatctgacacacagcactcagagcagaccccgtcccgcaccatcagtgccatcaccagcacccacacccagcacacaaccctgcgctgcctgcgcccctggaacccgcccgccaccacacgagctcactgcctctgcccctgcaggcccctcaccccgcctcaccccctccctcacttacaggcccctcaccccgcctcaccccgtccctcacttacaggcccctcacctccaccaccactcctcccccacccctccctcacccaaagggacgaagtgccccaaaccctcttcccactgctccggagggacctagacgaaaccctggctgctcttccagaggtcacggcccagcacacgtgccggacgagggcggccgcagaggcccagcaaggccaccacacatgaggtcagggctggatctccctccccaagtggctttaggcttccaggaataaggcagcactgatgcctgcccccgctcccagggccctggggctgccccaggtgtgggacgctgtggctgccccatgcaagggccaggactccctgaggcagcactgggcgctgcagtcacccctgggggcagagccccagaagacctgctggggggtgggggaagactgctgggggtgggggaagacctgctgggggtgggggaagccaggagatccctagcgcagaggtcacacagggtcaaggtggggtcaaggttgaacaagagtggcaggcgcccaggtgagagctggcagagcagcgtctgtggagccgaggctgcgggggcttggaagcaggggagggcagacctgtgcagagagcccttggcataactaactccatcttaggaaaagactccattttgtctcacagggcactctaccaagaaggataagatgtctgtttaaaaaccaaaaagcaaaaaagaagaaaacctggccatgcatggcggctcacgcatcagcacttcgggaggaggccgaggcgggcagatcacttgagatcaggagttcgaaaccagcctggccaatatggtgaaactctgtctctactaaaaatacaaaaattagccaggcatggtggcgcaggtctgtaatcccagctacttggaaggctgaggcagaagaatcgcttgaacccaggaggcggaggctgcagtgagccgagaccatgccactgcactccagcctaggcaatagagcaagactctgtcccaaaaaaaaaaaaaaaagaaacaaacaaacaaaaaaatgaagaccaagtccaaccagataaggacacacacaagccagtcctccgtgctcagttctccctggaggcctctgtcttcaccgccgctgtctcacagtcacctgcagcagcccaggccaggcctctgggctggtattaaccctctgtcttgtgtctttttcctcatgatgttaaacctggctttgggtggaaagtggaatttgaccagatgagcacacggcaatatacggtctgcaacactgaccaacatggagtggccgtgaccgcagcatgacccagaagctctagggagaacctgcctgcttggggactccacgtagctcgtggcttttgtgattgaaacagcatcaataaaagcctgaccctgtggaaagacacaaacccgcgtggacctcgtgtcaagcccatcctgtgtgcaaagtgcctccaggacctggggacttgggcaagctcccttcagccaagaacaagagggtggccatgctgttccaggctcgattcacgacggacacccccacggcttccctctgcccggacccagtcatctccccactgaacaccctctggatgtggggaggccagcatggccccctgcagcccccctcccactcgctggagacccccaagtccaggcagcctgagtcctctggcctgggcaggcgcagtccccatagctccaccttccgactccccagcagcggcctctgctgcacggcccagggcgtccagggcagggaaggcggggcacagggtggtcctcccaagatctgccccgggaaggaccacggccgtgcttcagaagcacccgggaccacacagtctgaagcagaggtggaggcttcgggcacaggcggcccggccaaggtcagccccaccaactgcccattccagcaccagagccaactgaggcctggcactgctcagccacaggcagcggcggcagaaactgtgcctgtgaaggctctggcccagcacccaaaccaaagatgaaggcgcaggggccaaagccacattttaaagcgtctcatgtgaaaactgtcagcatctctagcgtgagcccaagttcagattctacccacgtacaccccgaggacgtcccagctccatgccattgagaagctgtaatccagtgcctgcctctgagctgagggcagcaggctggaaactcagcacgacttccatgttgcggtcttgaggaaaatcctttttcttccggaaacctcagtctttgctctcaaggcctcagctgctgggacgacgcccacccccacggcagagggtcactagcttcacttgaagtccgctgagctaagtgttcatgccgaaaaacacctgcacagcagcgtcgaggcaggtgcgtggccaccagccgggcaccatggcgcagctgcgtgtatacagagtgtatgcatacagtgggcatcacgggctgggagaggacacaggggcctcggccagaggcctgggactgcagcaggaacgggctgattcagcggtgcaggcacagaacaccctgactgatgctgaaggacagtggtggggagagccaggtctctcgccggcagctcggctccagggcaggtccaggccacacacctgcccaggaccccaccagctggcctgcagccacagagagaggccccaccgggaccctcctcgtgggaactgggagcctccacacaggccagccagaatgcctcagcccgggacgacgcgccagccggagctccagctgcaggggcaggggttggggcgggggcttccaggaagaatagtccctgcaggctgaggggagggtccagggcctagtgagaagctcaaagcgcagcaccgcgtgtggaggccgggtgggtccaagagccagagcctgccccacgctgcacccctccccgccacccccaagaccacaagccacagccaggtcctgccctatccagctgccgccccgcggtggacgtcggcacagcagcaccaggaaggccctgtgtcgggcaccccaggagacaccagtcctccgcccgccgccacaggcccacggcttccagctcgaaggcactggccctgaggcaccgtcgccagggggcactcggccccgcccacgtgtgcgacccagaggcctccgccaggaccccgaagctcccggctccaggcaggggcgctggcagtggtgccgaggcccaggcagacaaaccatacgcaagggacgtcccatttccaagccgcgattaatttcctgtgctcgttggccaagttcttcaattaactgagccctgggaaaaatgcgcagacatctcgtgcgccttctgcgggcgatcctctgtctgcctaacggggttttctctgaactctcagcggggtaggagcaggggaggacgcgggggtccctggcttcccagtcaggagcccagaggcttgggaggcaggaggggcgccgcggggacacagagggcatcacacatcacaggaggggctcagggacccagctcagcccagcagagccacgcacataatcctgtgggcttcccggaggaggcgtgtacaggggcgggggggctacaggatacagaggagttggccacagggggagaaggggaagggcattcccagcagagggaggagccgctggggaggcctggcgagagaagggcaggcgtatctgcatcccaccgaggatgaggctgaccagacttgagaacagggcggggtggggacaacgacagccccacagacttgaattctgagtcctcagtgccgcatccaggaaggcagctcctcgggctgcagggaaccttcctctaaactaaaaaaaacgaggcccaggtcccaaatgttcaggactcagcctgcttcctaaggtggctccgaccaggcatctcagagcattccagaaaccctggagacagaatgcagccggatgcggccgagatctgtggctcctcccagcaggcgtggaccaggaggaataaagccagaattcagggagatgaatctcgcagccaggccctcagaaggctccagctccttccagctcagcttccgcccatctgcccccgcctcgccggcccgcagaccctgcatgaaggaagcagctgcccctcccgccgctgcccctcctgccacagccccacccggaaagtgcaggcaacagctccgacttttgttttttaagtttttggaacagatggcacagatggcgctgccgggggcggccggtgcaggggaggcagagagacggacgtgcgagaagagccttggaggagggaggaggcggcacggggtgcgtctgggcccgtctgggggacgcaaagatcccggtgcctcggccgtggctccaggccccaggacagaccagggaagaaacctccaaactgcggatagttcccaaacgcactggccagccatccggtcggccgaaccgtggggaagacacaggggcttccaggcctccgcctacaaaccgtggtgtccccaagacatccacactcatgcccatcttagagaaggggaaactgaggctcactgaggcaggtgagggcctctgcctctgaaccaggggagggagagggcggcaggagacccctgatggcatcccccaggcctcgggagaggaggctccccgggaacactgggacacactccctgcccatgtggcctcagggtcccaggcacgacgagcgtccaaatgtgggacactccctgagggccagctgccagaggcctctcgggacggggccatcaccacctcagacccaggcccacagtgtgggtacagcccctcctgcactaagctgggggacacagcccaccacggggcactcagctgaggtctcgctggctcggcaagggctgcccgccccctcctgcccaggcagcggccaagtctgcaggaaaagaaagaagagacttcctacgggagaatgggggaggatgaggggaggacggcgggaagacgatgggaggatgggaggacggtgggaggacgctgggaggacgatgggaggaccgagcagcttctctgcagcccagaattacaacacaaagggtttcgaagctaattatgataatgggttcaacttccggagcttccctggcagccgttgccaaggagataaggcaagtagctggtccccagccccagattcaggcaaagagtcaaggtgggggcagggaggatccacagagccctggcacccaccactgagcagaggggcagggggacacctggaccgcgggcgtcggctggggctcaccgcacgtccctgacgcacagcccagccccgtgcccatcagacagccccagatcacaagagaggccatggcggggatcaggcaccccgaatgcagtcacagactgagcatggagcagcgggggatctcctcctgggacctgggacccaagtgcaaagaggagaagttggggcagggaggggcccatgggagggaccaaagggtcaccaggccagaggggtgcccagttaaggccggaccacagtcctggggcccccaccgcccagttaaggccggaccacagtcctggggcccccacgctggcaccctcaggccttgagatgcaaaaactcctctactcacggggcccccacctccgggagacccctgtgctcacggaccccccacctccgggaggcccctctgctcacgggccccccacctccgggagacccctctgctcacgggccccccacctccgggagacccctgtgctcacgggccccccacctccgggaggcccctctgctcacgggccccccacctccgggaggcccctctgctcacgggccccccacctccgggaggcccctctgcttcacgggccccccacctccgggaggcccctctgctcacgggccccccacctccgggaggcccctctgcttcacgggccccccacctccgggaggcccctctgcccacgggccccccacctccgggaggcccctctgcccacaggccccccacctccgggagacccctctgctcatgggccccccacctccgggagactcctgtgcttccaggtctcccccgccttccttccccattctggttgaaggggatatttcttttctgggaaagcatgacacagacgccgccaccccgctcctcactcgcttcatgcacttggggaagaggactcgacgcaggaggggtctgggccccccgagtcagtcccacagccagccccctcgctctgcgactctggatcctccagtcaggccccttccccagaggctgactccaagttggccagggctgttcatctcatcttgcgtatttagttaaatgaaaacggaacacgtgaaggatgggcgggcaggagggaaggcgtcaccacctcaccgccaccctcagcccctgcctcagacagagccagggttgggtcaggaggggcccctgacatcaagaccccactcccactccacgggctaagcttctcagcacacccatgacctgccaggagggaagcagccctacagtcacgtgcccatttcacagtcgggaaaacagaggctccggagactctcagaggcccacgtgcggattggccagagctggctggctgcacggcccccaccatgcacccctctcccactgcagggggtcctggggggtcccacgcagcctccttaggcagaaattccctgtccagaacaatgtccatgctgatgaggctgcacctccccggggctggggacctgggagcccagcagggccccggggatgagcagaaagccagcgtgaggccggagtgggcaccaggtccaggactgctcgagcctccctgggggccccgctcgcctcgtccattaggcagccgccacgctgcaacctggaatctaatttcaccatctaatgaactgctctgtttccaggacacacgccacctcccacctcagaagtgacgggcgcgggcgccgctgacagagtccaggcgtgaaccgggcatgaaccaagcgtgatggatcactgcagaccgccggggctggaggggacaagggccacgctcctgcagagctgcacacagagacctctcgcgtggagccgcctcatgctgagcactgcgtggcttgtacctgccaggccagggtccaccctcattcggagcttccggcagcacccacctgagcctaaggccatggggcagggacgggaggtgacccaggtgggaccgagcctcccaaacactgggtgctcaactggaccctgacaggacacaggtcaggaagtctcaggtcctcagaaggcccagctgctagcctgatgctcacggcctccaaacggcctgggcctgcctatgcccgcctgcacccacctggcacctacagccctccttccaacatcctgggcagggaggcgctctcagggggctctcgatgccccacactgaccatggccccaggatggccacttccttcagccagctgtggctccctcgggaacaggagtggaggagctggaggcgggggtcctgcccacctgcacgttgctccctaaccactcccgcagcagacgcccaaggcccacagggacccccagccccctgcattgctgcagcaaccacaggtccttccagggccttcgccccggcccagaaagagggggcatccgccatgcaccccaggggctctgggagctgcagctgtgggcagactcccaggccctggcaggaaacccgctggctcagcacgtggttaaatcagctccccgggcactgcctcgtgacttcgcagcgcctgctcacggtccctggagacggaagctccgcagggctcatttgttctccattagtcacctgtcccacccagaccacaggtgctggacagagacccagccggtgcaccaagcagggctggccaaagtgcccagcccagccccatgcagaggtcctggcccgccctccccgaccccgcaacctccctgggctcgcagcccctggcctggggtcccctggactttactcttcctcccggcatgccccggctacccactctccactgccccatcccaacccactgagcccgcagagaagcgcccctgtaccagccactttgatcccagaagcatgtggagaagctgggtgggaatggcagccagcataggcgagccccaggccctgaagatagaccccaccctggcctggccctcgaggccgctgcagtgcctcatggtggaccccacgcgacccatccaccctgctcccctcctgccctcggcaaacgccgtccctgccccagggcctttgcacgtgcacttcctgctgcctggaatcctctcctacccgcaggtcccagagccgccccctcatcccccaggcttcaatctcaggtcactttctctgaaaggctgcccgaccatcccttccccgggcagcccccaagtctccctggtgtattctctccagggccctgagcctgaccgagcactgtccccccagagcagcggtctgctcgccctcccggaggcaggaccccacatcctctgctcagacagtggccccaagtgcccagcccagaacctgcacagaggcgtctccccacatccaggcaggcggcagccaagaccctgccctggccaagttgaacctgctcgagagcccaggctggcagctaggcctggggcccacactcaggcgtcactgcaccaccttccgcacagcgggaagagcaaggcgagggctccgggagggggcctgtgtgggtctggggggctgagatgaggagggcacggcccacccagggcacctggccacatgtgacgcaggcttcgtcccaagaggaatgacgaaatgtccagagacactcaccgcgtgtccacagcagcctcacggcagacgcaacccaacatccagttggtgggtgggtagataaactgaggtccgtccgtgcggccacaggaaggacgaggcagcggcccccagacacggagaggatgaaggagtaccctaaacacgaaggaacctgagggcaggctcggcaaggaaagccaggcacaaaacggcaccacgatgacaactccacttacacgaaacatccgaagcaaacaggccaggcccggcggccacgcctgtactcccagagcttggcgaggccgaggcaggaggacagcttgggcctaggagttcgagaccagcctgggtaacacaatgagaccccatctctacaaatgatttaagttagccagatgtggtggggcacctgcagtcccagcgactcgggagacggaggctggaggatggctcgagtccaggaggtccaggctgcagtgagctgtgattgagacactgcactccagcctgggcgaaaagagaccctgcctcaaaaataaataaattaaataaaataaaataacaggcacgtcacagagacaggcaggagaccggcaactgccagggacagggtggggcacacgatggcagagggcaagagtgtccacatggggtgacaagttttcaaatagggctggtggcggcagaccatcactaaattctccactctaaacgcctctgaattactcgctttaaaatgctatctgcatgttaggataatttaacctctatttttaaaaaacaaaataaaccgtgttgtcaaggtctgggacagcaagcgcacacaggtaacctgcctgcccatcagtggctctgtgcctagggtgtccacccacctgtgcctcagtttctctctgaataggatagctttgggtggggagagttaacactcaccacaccttgtcccctccagactcctccagtccatggtgctgttgtctcggtaggaaggctggaatgtggacaggtgcgtttacactacaggaagcagacggcacccggggaccttgtgagctgtagaatcgccccttcttctgtggctgaagcttggctctggccctggccagtgtccccatcccagcccagcctactcctccccaaacccgagccccggagcttccctgtcatgcacacccccatccccagcacctttggggacccctgcttggcctggcctgggctcctgaccctgcaggtccctccctggccttacccaagcccttagcagctttggggagcaaaggcttcatgaggtcccaggggagctggggtggagaggggctccccccaccctcaacaagggggctcctcctgagacatcccacactcccttcatgggctcaagctgcctgtcagccccacccgaaacccattcaggtgctgagggcaccccaacagtggcactcctgaccgaggctcccagcaggccttcccccccacagccccctgagacagccacgcctaaccccctcccaagcaggccagtgccctcagctggtccacggctcacagctccagtccctggccccctacaaacgtcctagtgagtgctctctctcggcctccacttgcacacctccggcgacggagggctcaccccacagaaagaatctcgttccaacacaagcccctcctgggccagcctgcgtcctccctctcccctcaccagccttcctggccagggtggcctcatcacctaatcacattcaggcagacccggggcctgcaggacagccctggatgggacacatgtggattccccaagcctcatgtggacacgtccccaggacagctgtggtgtcgacatccacgcagggacaccacacaacacagggactctgccgtcatccatgtccacaggtggctggacaggtgctgcggcagccccaggtcagagacaagccaactacctggcacgcgagactcatcttgcccatgagaagtgtggacagtatgccgttaacaccacagcgggacgggaccgcctgaatcctattctgtttagaaacgcacaggcgggcgcagacacctggaaagaaaccaggaagagcaaacgtccttccctgttttccacgctttcccagtctcctgcggtggatgtgcttactttgcagtcagaagaaaataagccacgaccaaacgtttatttaagaaacgagggcggcaggggccgccagaccccctcaccctgacagacgcagccctgtccacccgccgctcaggccaaggcccccccaactttcttcacgtgatcttaactcagctcttggctaattaaatggcacccgtgggaagggatggtctcagataagctggctcagtgctaattgtaaaggagagaagccggtcgtgtaccttgccccagcagccaccccccaccgatcattcctcgggcacctcccaaacaccagccccttccccatagctgcccagaggtgagccaagcccctgactctatggcctgggcggatgccaaacaagaatcacacaaggggatcctctggcccacgaggagccgcaactgcagctcctggtcaggaccatggccagcaccccgggggccggccctcctcccccatccccaagagtggccccagagcctaatcaggtaggagggcagaaatatcacctaccccaggcagcagggaggaggaggctgcacctaccccgggcagcagggaggaggaggctgtacctaccccgggcagcaggcaggaggctgcacctaccccagggagcagggaggaggctgcacctaccccagggagcagggaagaggctgcacccaccccagggagcagggaagaggctgcacctaccccggggcagcagggaggaggcagcacctaccccggggcagcagggaggaggctgcacctaccccagggagcagggaggaggctgcacctaccccagggagcagggaggaggctgcatctaccccaggcagcagggaggaggcagcacctaccccaggcagcagggaggaggctgcacctaccccaggcagcagggaggaggctgcatctaccccagggagcagggaggaggctgcacccaccccagggagcagggaagaggctgcacccaccccagggagcagggaagaggctgcacctaccccggggcagcagggaggaggctgcacctaccccagggagcagggaggaggctgcatctaccccagggagcagggaggaggctgcatctaccccaggcagcagggaggaggcagcacctaccccaggcagcagggaggaggctgcacctaccccaggcagcagggaggaggtggcacctaccccaggcagcagggaggaggctgcatctaccccagggagcagggaggaggcggcacctaccccaggcagcagggaggaaaatgcacctaccccagggagcagggaggaggtggcacctaccccaaggaacagggcatctgcccccacatcaaccacctgagcagcaggcagcctagagtggtgccccagagcctcctctccctgcacacaccttctgtctccagcctggacgggtttccacaaaaatgtaacttttcaatgacaggaaaagtgagtgttaaacttctctgcatatttggtcctttgggatgagaacatttttacagccaccaggcagcttctaggaattcatcctgccgacctgcaccttgcgtgaagatgtgcatggagccccacgcagcaccatttgcagcggcaaagtcctagcacctgcttcaaggtccatcactgcaaaccggtcagagaagtcgtgagcgcccgacggagcctagagggggacatgcagggagagggggccacacgcacaaggcaggacacggagtgactccacacatgtgaaaagaagtgagtgaacacacacagacacacacatgctgtaccgtggcacgcatgcagagaacggctccaggagatgggccatggctgacccggtacggagatggggcagcgcagagggggcaaatcatactggctggacatcattttatatatttcagggtttccgtgggtgtcttttctgtgtgtgtgtgtgtgtgtgtgtgtgtgtgtgcacatgtcatgtgaatttgacctattctggaagaacgggtaagaagggggtcatctcccagctactcaggaggtcaaggcaggaggatcgctcaggcccaggagttctgggctgcagtgagctacaatcacaccactgcactcagcctgggccacagagcgagacccccacacttaaaataaataaataatagaatacggacatcaggccctgcctggccttatctggtctacaaaggggactccaggctgcctcctgctccgtcctggggtggcgctccccgatatccctgcctccctgaccaccctactccaggagaaggaagcccagccggccgagtgctgctgcccttccccagggctcagcctccatgacaaactttaaagtcccacacacgtgccctctgcaccctgagtcccagcttagaaccctgcacccgcacacaggggcagaaacacattaaccaggcgcctccggcctcccgcccacagcccctcagggcagacatcccaacctctcatccctgcccgaggcttctccccacctcctcccaggacagggagccaggcagaaactggccttttgctcccactcacccttctcatgttttttccaaacctaaacagaaaagcaagctcgaaagttctcaggtgttcagcttacgtcacgggtaagggctccatggggaggaacaaaactagagaagacctggaggatgaggcgggggcagacagaggcagcagatgcctccacgccacagatacagaggaagaatctagaaggaggctccctgcaggctgggcagcctggagcccagcccctgccacacccccaggagctgcccgtccgcccccactgagatgattcagggatgggagactccgattgttcaacccactccccgccggacttcctggagcaaccatgctctcctatgcatccacaaagccattcccagcaacccaaaaaaatgaaagacctaattttgttcaagctgggtaggcagcagagcctaatgtcagttccagagcacgtctggaaaacatcctcatccccaaagcgaggcagccactgtctgaaaaccaccactccccctgcgagaggccgcccagcatcccctgtctggggccagcacaagctgctggccctgggctgggagctctgggcagctggtggccagagagaagccttctcagaggctggcctctccactcaagccgatgtctcctgtgggggtggaggggccgccaagtgccccgaggcctcggggcaggtaccttagcctcacccaccccagcccctcacctggcacggggtctgtggtttagacaacagaagggacatgaagctctgtggagagctcccgtcgccccgtcctccaccacacatcatcctggggacctgcgtgtgatgccccccacgcacagcagcctgcaccccagggctatgagcccctttcaagactgaagctcccaccggggccgcctaaccccacagggagcacagcacaggcccactgctaacaggagaaagcacctgcacactagctccccgacgctggaacagggccatggccctgcgccccacactccagctccactctccacaggaaaaggctcccagaatccagccactcagtgtgtgggggcaggggccctgctgacttagaaacaagtggcacattgatccgcattcaaacttgccagccaatcaaccacagccccgcgcacagactctcccaggtgggactgagggggtctcccctgtccttggcaggggcgtctcccccacgcacccccagtcccgtcctctccacaggctccagatgcccacatccccagaacactcaatgggacaactcagagcaggttacagagaaagaaaagccacacaagctcaccaagggcacgctatttcagaagtgccttctcctcctggaaatgtcgaccccaaagctctcactgggaaacctctggcctggccccgggaagcgacaggcgcaggtttggggctgaggccgtcccagcagctctgtggcctgccagacctcagagcactcccatcaggggccacaagagcagagagctcttcagccccatgttctcctggacgaattaaaagcacgacccatcccagcttcagaaaacaaaaagtctaaccctccatttcccagactccagaccaacctatttgctaagcagcatcctgagccactccctcctccagctctgtgggtacagctttctcaggctaaaggggaaacagaggggcttctcagggcccacccgccttgtgctggccgcctccctcacaccccctcacccaggagccatcaaggacagagcctcctcctgcagggcccacactccatcacccgctgctgaggccagcggtcggcagggccctgccactcagagcccactagggaggcaggaaccagaacccactccgaaatcaacagagaaagctcggcacacgggctggtgagcgtaggggtcgcacgcaggggccagcgggagccatttccagagagttcctcggcgacaagctcagatctgcaggcccctcctccttcgaccttgcatctgttaggcgtgttgaacaggtgccgcccaccctacccaggacgcgcttcctcctctgaggatgtccagggccctcccctccacaaaggcaccgttttgagactcccagagctgtcagccaagtgttgtcggaaggcagagctgagctccagccctgcaaagggcatccgcgttccgggcaccgccgtttccgctcgacgctccgtgctaaaggcggcctcatggctgggcgcgtgtcggtgctgaggcgtcccggcgggtcctctgctgccgtcccgaggcggcccggcgggttctctggcgcggtctgcgtggaaactagaagcttgcactgcagctctttcacagcttaaggggttccctggtaaaacctgcccacagtggtttctcaagccgaagatcattcctgtcctccaagcctcaaccctcaggatgctgggaacacgccggaagccacgaacaggaagacaatcccccaaactacccggcacacacagggcaggcaccttcgttccaagtgaacagccggcatctccgcggccggtcccacacgacaaacaggcaagcttcccacgctcgagcccgggccccgcgcttcaacccacgacccccgcaggcttcccacgctcgagccggggccccgcgcttcaacccacgacccccgcaggcttccgacgctcgagcccgggccccgcacttcaacccacgacctggccctcaacagcagcgcaggcctctccgtcacggcccagccgctgaccaatgggactgagaatcggccggaggggcagagcgacgccgtcccggaccggccagccatcctccctcctggcctccacgctccgtccggggtgaggccttccactctgctgaaggagcctcacggtcacggcgatgacagctacgagcttggggaacatcgcacgcatcaggcatcgtgtggagtgactcacacgttgaatcccggcggccatcacgtgacacagatgcagacaggttacccccaccacgcagacaaggaaactcgggtctaggagcccgacgctggccagtctcaggatgacgcccccggccagagccccagccctgccctccccgagcctcacgccccacgggtcacgcagggtcttcacaggtcacggccacacaggagcacgtctcacacgggcggaagcacagaggggagcggggctgcgtccacagaccgcgcacacacgagcagtttcccgtctcagagctgcctggcatgcacactggaaaatagttaagacagccccccgtgaggtaacacgcttgggctctgtctgtgatgacaagatgtcggacacaaggccaaggtctcccccgggggacatcgcaggcatcaccccaccatccttgccccccatcctcccaaaacgggcacattgctcccgcctgagcctttaacaggacacggcctggccgctggccccagcctcccgtcaaacctcaagtggaccttcggagggcccagggcacaggctgcccctcccctgcctctgggcaaggcagctcggccatcccatatcccttctccccatattcaaggcccccacaggtcccccttggtcctccagacttgcccattttcctaggagggaacccactctgtgtagcagattcatctccccacactggaagcagcttcaggcccagctcctctacggctcctctacggctgcggaacgtcattcctacagggctgaggctagcccggctcctgtgcagctatggaacgtcactcctacagggctgaggctagcctggctcctctacggctgtggaatgtcattcctatggggctgaggctagcccagctcctgtgaggctatggaatgtcactcctacagggcagaggctagccccgtgctcttgcgagcagctgccagacggacttgctgagtgtgcacacaggggccatggacgtgtcaggagcacagggactaacggagatccatagattcatttgtttattgactaaaacaaactgggaaaatcactatgttaagccactctccaccactggactcagcctgtgccgtgagaagtgaccccagttctgaaacactccaggatttaagcattttcaaaactggagacaggattcccacgtggtcagcatcctgggggccgagaatccttagtgcccagcagtgcccatatccagggcgccggcacctctggagagaccgcgtctctgcagagattggcttgcagtgatttctaataaaacagattttctctgctctcactgtggaatggtcaggaggagagtttctgcttatcctttagctcctatcctctcacagacacagaatgtgcacagagattgactccactgtgtaactaagcagcatcatgtacaatgtcttatcactccagagtaatttcactttaaattatttggtgaggggcagaaatcctgcgaggaagcccgagacctcccaaggggtccaggaaccagagaaatccaggtttccccagaaaccacaactctccgaggcttcttcaccttttgggaaatttccataagatttcctacacaggaggctgtgggaagaaggggaatgtggccgttcaagcactcgagtctctttctcggcacacaatgctccgtcagcagagactggaccctggtcctgccagggccccgctctgtgctgggtaaagcccaggcctgcactcacccctcaaagcagcctgaccaagaagagagtgtctgaaccccaccactgtgccaggcgcctgcccaccccagccagcccttcgagggctcacaccagccccagagctgaatgaaggggtgggaaagaggcccagcggcctgtgctcagcaccacccgagttctccaggactgtgaggggaagcgcctgggccccggcaccgggggacttgaacataggccctccgtcccaggcccttccctgcagtgaaatgggacacagcacctggtcaagcagcccagggccagaggcccctaaaaccctggaccccagctgaggcctggcgcaaaagccaggatggcacagcgagccccagggacaggccctccccggtgccagatttcccatctggcctattttaaacacagcttcactctggccactccacgtggctgggctgctggcaagatcaagcaatctgcacccccaagctctcatctcaggctgggaccccccctttcagttaagcaggacaactctggagctcactcaaccttcctctgcctcagtttccccatccacaggaaccaggctgcgtgaccctctggcaggctgtaactaagcggtaactgaggtccgcacccagcgggaacagagcggagctccctttcccacacccagcaacccacgcggggatcctggacgaggaggttcaactccgtggtggagcagtgcccggctccagtcctatgcgcagatgggctgcaggagagaggctggagcccgggattcaggctccgaagggccccccatggtgatctggcccagagtcccctgcggcagccccaggggcacatcatctgctagttcgggccatttctgcagctcacactccctttgggaggtctgggagaggtggcccagcaccccgccccgaccaggcagagagcaggtctgacgcccttctaactcagagaaggccctgtctccagagcctctgggaaagcacccaggcagtgcgagcagaggccacggctcccacagaggagcaacagtggatgaagtccctctctaactcagtgctggacgtccccacctccccagagcgggggcagcaggggcctggcctgacgcccaccaagccctggggccatggggcagcagccaccgccctctctaccccagacagtggctaccccgggtccaacagggatgcccagagaggttctcacaacttgacctctccgaagccagacactggtggcaataggcaaaaggcaggtgggcctggggacctgtattcagccacagctgggtgcggcagcacaaggagccctggccttccccccactcccggctgccccaggcccaactgagctccgtctccgtttagctgatgaacaaacagaccaaatgctgcctaacacgccacacgggccagtccatgccgggccagaggacatggggccatcaggcctcccaagtggaggtgggggctgcactccaaggatgggctgggccacggggacagcagcaaacaccacaccaggggtctgggagccgggcggtgagctgcaccagcagtgctgagccacatcccctttcacagagggcactgggccggcctggaagagtgtgatgccccccagcagtggtgttcacaaagccctgggttgagaagcagctgtgccgacgttaccgacggaaaactgaggtttgcagaggttctgagaccagcccccagtgtccaacccgaggcaggaccagaaaccctgctctccagccccgccgcttagaaaaaatccccctcccaaaggggccgcctccctgagtccaagccacccctgcccacagcaaaggagctgaggagagcctgggagctcagggaggttcagggagctccgtgcccacagcaaaggagctgaggagaggcctagtgcaggctggaaggcggggctgttcagacgttgagggtctcgcctgaagcccccgcatgctgctgctctatcttagagggggcccgtccggactgggggtggtcaggaagagacggctcagaccccacatgtgcaagtgtccccatgctttgccccagttctggactgctgctctcaggaggcagagacaggaaggagagacagaggggctgacccacgcaggcccaggcagggggcggccatgcggagagctgctgacccaacgggaaacctcaggaacagccacgctgggcccttggatcatggactcaaagcagaaccaaccctgggtcagacgcagagcggggcgctggccaggctgtcagggcaggagggttgtgggggtgggttctatcctaccctcctccggggagtcaccttgggcagggacctggctgaccagtaccggcccaccaagagcccctttggcccccagccaggtgggggccatcaggggaggccattcctgagaacacagaagctcatctggggattcgggaatgaaccctggactggaaaagctagactcacctcctgggggccacagggcttccaggacccaggaggtcggagaagcttctgcttggggagtcccaggctgggtgcccaggggccctccacggagacaccctccctgtaagcggcctggcatttccctctgggatcttctccctaccccagaaccctctcatatcacagtccacggagggtctgctaagggcacactcaaggccacacgcaggctggggcacactcgtggggcacacacccctctcggcccaggtgggcgcccgaccagcttgtgaccagtctgcccctcactcccatcccaaaatgcctctcacacaaaatggccggtcccggagctcagcgggtcccttgttcagctgggatgggagagcaagcgccctggcgcggggaggctgtgcacaccggccgcacaggccgcacacgcagcgggccgtgcaattccacatgcgaacacccaggtgcacacggacgcaggcttcggccgccccccgccagccctgccccaggaggcagccgttccctgagcctcgcccgggaagaggggacagccccttccaggcccagggctgggggtcccaggtctgccgcagcccctcccccgggcctcgctctgccaaggaggggtcctgagcccgggatgtgcacgggggcggccggcggctgcagagatgggacagcgcaggagctgagcgcaggagctgagggggttcgcggggccagggaggggcgtcggcgccgagggggcaggacagacagctgcgctcagcccgggctggggtgggggggtcatgggagggcccctcccccatctcaggaacccagaagctcaccctagtctgagggagagcggctcgggaggatggcggaggacaggccagacccctcccccccgccctcgcttggtcgggcggccccagccccgcgggtccccgagagtcccggagagtccagacccagcgctgccgccgtccctccccggccggccctttgttcggcgcagaggccgcggggaggggcctcccaggctgaggagggggctggggcggccgcacgtctctgtcctgcgggcctggagcccccaccccgacctgagcggccccgaccccggaatccttcctgcccgcgcgctgtacaatcgctctccggtctcggcccagcactcccgccggggagcgccggccccggacccagacccaggggcagggagccaaacccgccgcagccagcctggccggggtcgccgatggggtcgccgatgggggtcgccatgggggtcgccacgggggccccgccggccactcacacgtaggcgtggtagatgaacgcccagccgcgcggccgctccagcacgttgtagaggaaattctgcagcttgcggtagaaggcgttgcgcttggggggcttcccggcgcccgcgccgcccgcgcgaggtttgctgaggatgctgccgcgcttgggggcctcggagccggcgatcagcagcgccccgtcccgggtggagtcgggcgcgccggggtccagccccacgaagcccaccttcagcttcttctccccgctcgggccggggtatacgccgccgttgcgcgacttctgcaccatggtgcctggcgggaggcgccccgggtcgggctcaggctcagcgggggcggagcgcggggggcggcgcgggccccagcccaggccccccggccgggagccgcatggccgaggcggcggttccgcactcctgccgggcttgggccgcgcgcggagacgctgcggccacctcgctccgcgcgcacctcggcgcctggcccgcggccgcgccggctccgcccgccgcctcgccccgccccgcgttaacccccgcgacgccagtcgaaggagaggggaggagaagagagggaggggaagggaggggagagggagggacggggaggggaggggaggggggaaggagaggagaggggaggagagaagagggaaagggaggggaggggagggagaggggacggggagaggggagacaggaggggagggggaggggaggagaggggaatgggaggggaggagagtggcggggacggggagaggggagacaggagtggaggggggagacaggagtggagggggaggggaggggggagaggagggggagtgggggagggggaggggagggcagggggagaggagggggaggcagaagggaccaaggcccgcgggaccagagctctgggctgagcctgcccaatcccccggccatgtgcacactgaccctgcggtcacctttgagtccggtagtactaaccaagtggacctgcctggtggccccagcgctcctggggtcccagagcggtgcccagccgcctgagcaggactggagtcttctcagctgggccctgggagtggacgcctccgggaagggatgggggtaggggctctccccaagactctgttagggctcagcccatggtgacctcatgctctcggtgtcagggttgcccaggcagtaggaccccctagaccccagggtgtgtgcagggagggtctgtggaggctggaggcaccctgcaaggaaagcagcccaggggaaagggggtggccacagaggccgggaggcaagaagaggagcaagggccatggggtgggggatgggagagagtcactcctagagggccttgaagccccccaaggggcctggacttagttatgcagaccccagaaggggcctgtggcaggggcagggactggagggtggccccagggcagcagacaggccagcaggaagcccagtgccacacctcgggacaaaggaggcagatctgtgcctcctggacacagatgggacggtgtttccttgggggcaagtgcgcggaggtggcctcccccctgccggcagccatgtgtcctgggaggggtccctctggagctgctgctgggagaccaagggacccctgcggctcagtgctgcccgccctgtgaggtgccccgccactgggccttcctctgcacatccaggaggggtgtcatcttcgagtgcgtctctgactacatccagcctgtttgcacgttcgcctggcaccatgggttctacccagagaaaggccctctgctgaatcgctggcgccgtcctcgcaggtgacctgctcataaaacagccctaaccctggtgcagagtgagctcttgagttgtgtttgccctttggtttccagagctagtggccacggggcctgtttttgttgttgttgttttgtttttaactaggctgaatacagaagggtcggtgcaggcagaatgctaacctgtacgttatccaggacgttggggatagacggcaacttacacaagcttgtgcacatccaggggtactttctggatccccgcctccctgcctctgtgcccacgcattggctgtgattaccagcatgaagtgggcttgccccaagcggctgcggtttctctcgattgttaagggaggaggcaccagcctggtgctttcaggggagggagaggacttcagtatgcagaaggaagagagcaccgtggcatctccctgcacacgctggctggtgccgctggtctttcccactcaccagaagacccgagggagcagccgtagctcaaaatgtaaaccctgcagggctggggcccctcatcctgtggggggaagccccagactatccggtgcccctcggcagtgcccgggctacacgtgacctctcctgggcaagcagtcatctcaggtttgatgtcagagcccagtgggacccaaggtcagggctgatccacagaggatgaaggaaaagtgaccccagttcccgtttgagcagatgcaccagagctgagatgggagcaaggattaaggtgctctggtgtccaggacattgggagagacaaacctgttcatcttatttttcagaaaaaaaaggggaaaaccctgctgaggtcttggggagccatcggctggcttcacagcctcctgggggtggccgagagtggcatcccccgtggggatgccgggctggaggggccggctcaggatgcaggtggagctttgcaccctgcagctcgcggttctcccgtctacaaatggcgttggctccagcagctttgccacaccttggaaggttctggaaagtgaatcctgcatcaaggcttgaaaatccttgcttcctcctttgtttaggatgtcctttcaaagagctagctcattaatcatttatgtttttaattttgtgtcttgcacacccacgggctacattgtcagcaatctggttacccgcatgcctgccccctgtcccctcctctgcgcccaggcaaagtgggtcgtgaaaatgcccagttggggtaaatttcatccaagcaggaggaattccatttatgtaaaaatagatgggaaaagcgttcaggctcaaacaatctttgccaagaccgcatcgacaggactccagagaggatgagcagaattcagacgtacgtggtgcccagctccagcggaggagacagtcagtcttcgcccaggcggccagggcagcagcggattccacgcgggcgctgtcccttcagcacctccagcaccatcctctccccggaacctgcaagcccagccccttctctggtctcctccaggcaagtaacctcaaggcctccccagtgtcccacgtcactgggctgcactaagcgaccagagaacatgaagattgtactgccagaactggctgctcctgccgatcaaggccagctcatctgtccccaaagtcctctggtgggctccctccccagcagaaagcaaaccacaggggctgtgaccgcctactgcccgggctcccccgggcttcccgaactgtcctccctggagcctggcgcagagaggggcccagagtcaatggttgttggaggacaaactgaagcacatctgggtcactgccagggagaacccacagggtaaccctgcccatatggtgctggtcacagagcagactcggtgccctccagaacccacgcctgtgctctccctcaggtgcaggtgcagtcctgctgggtcatgactccagtctcacaggctcggcactggaatggtgggaccaaaagtgaaaaaccgaggccaggccaggcggctcatgcctgtaagaccagagttttgggaggctgaggtgggtagactgcttgagcccaggagttcgagaccagcctgggcaacatagaaaccctctctctacaaaactgcaaaaattatccaggcttggtggcctgcctgtgatcctagctgcccaggaggctgaggtgggaggaccgcttgaatccaggaggtcccggctgcagtgagccatgatggcaccactgcactccacctttggtaacagagagagaccctgtctcaaaaagaaaaaaaaattaaaaattagctgggcttgctagtgcatacctgttgtctcagctactcaggaggttgaggcaggaggctcacttgagcccaggagttggaggctacagtgagctgtgattacaccactgcactccagcctgggcaacagagcaagaccctgtctcaaaaaaaaaaaaaaaagaaaagaaaagaagaaagaaagaaaaaattaattaattaaattcaaaaatgagggctaggagcagtggctcatgcctgtaatcccaacactttgggagtccgaggtgggtggatcatctgaggtcaggagttcgagaccagcctggccaacatggtaaaaccccgtctctactaaaaacacaaaaattagccaggcatggtggcaggcacttgtaatcccagctactcggaaggctgaggcaggagaatcactcgaacccgggaggtggaggctgcagtgagctgaaatcatgccactgcactccagcctgggcggcaagagcaagactccgtctcaaaaaaaaaacaaaacaggccgggtacagtggctcatgcctgtaatcccagaactttgggaggccgaggcaggtggaacacctgaggtcgagagttcgggaccagcctgaccaacatggagaaaccccgtctctactaaaaatacaaaattagccgggcagggtggcgctcgcctgtaatcccagctactcgggaggctgggaaaggagactcacttgaacccgggaggtggagtttacagtgaaccgagattgcatgattgcactccagcctgggcaatggtgcgagactccatcttaacaacaaaaaacaacaacaaaaaaaacaaacgaacaaaaaccccaggaaaccaagcatgggtagtgacttgagaggcatatgagcttcctctggccgccctcctgtgtggggccgtcagcagcgggatcggggaggcggggactgccactgtgagtttgtgcaagacggctacatggtgctggtggcccccgcgggttgtggcccctgctagaacaggccagattttatgctcttttgacgctgtgctgtcatgggtgggatctgtgcccaggtgctcagcttcacctgcgttctgagggcctcggcaccagtgacaatagcccctgcggacactggaaagcagggcctcccaggccaccaccccgtgcctcccagtggaaatggagggagctgcttccccgtcactgcgccttcagaaaaacagacgaccccacagaggcctggaggaacaagatttaatctggggaaatgaggagatgaggagagacaggttctcagtcatctcacctgggcccgtgcctcccggtggaaacggagggagctgcttccccgtcactgcaccttcagaaaaacagacgaccccacagaggcctggaggaggaacaacatttaatttggggaaatgagatgaggagagacaggttctcagtcatctcacctgggccagagctgctgcgggtttaaccctgtaatttgggcgacaggaagtgcctccccagacagggaggcccagcccccccaaaggaattttacattattaggaggaggaaaggctgtatttatccgcttgcgggggagcaggggagtgaggaaaagatttaagatatgaaagcattgattttttttaacatcttacactaaagtcaataaaaatttaatttacagttttttctaaaggaccaaggctctcaataagcttccctagcccctggcaagccggctaattgcatgagggagttgacttgtacttcccagccaccaataataccgtcaattgaggagcccgtggtcagctgtgacggctggggagctacggtggctccggaggcatccggaaagggcagaaatccacctgtagctctgggacctcgagggaactctctgcttgatgctgtgccgtggcatccccaaaccccatatgttgtcatctctggtccacaggtgtcacaggtggcctcccacacgccccctcctatgccttcaggcaaatggagaagctgtggcaatcgtccccgttctgtggcagatatatcgtgaggaacgcaggcgccacgctcactcgtgggagagaccaggccccaccgtggatctacacatccagactccctggcacctcgacgctacccaaatgctttcctcatcaaggcctcctcgctcctgagacctggccctgccacacgctccaagaccaccgacccctctgcccccgtcctcccttcctgggcacacggccaccccgacatccctgagcaggcaaggagctcttgcatttgctgtctcctctgctcaccaggatggcagacactgcttcttctcagggaggccctggcgcggggtcccctccccaccttctctggagctggtcctcatcccgatgggaaactgttttgcctggcgctgctgccccactgcacagagcgcacaaggtgtggggggaggggtgggcacagacactcacagccccacctagcccaaggaaggtgcatgtcaacctgtcagatgacagatggccactttgacctggggctggacgtcgctggagcccccagccagatgtggcctcagtcacaggcctggggcttgtgtggctcagggctgccggggagaccccaagaggacatgggcagctggagctcaggactagcggagcggccagacgtcctgcccatgcaggctgcatctgtgccctggctgcccacccaccaacgtcctgcccacgctcaccagggccttgcttggccagatgtccagtaggctttgggcggggccatccagccttggcaaggcccatggactgtcacagccctccccaccccacatccaggacaaggtcatctagcgccacaccaggtggatggttcagaaaggctgggttctccaagctgcacaccagaggctgcacagagctgaagtccggcgagtcccaaggctcccagggcggcccgctgccccacaccctccggcaaacacgaaggcgccaccctcggcacccagcagcatctgcctcagcccctgcagagggcggcgctggtgtgggctgcagagagtatggcccgcaggcagccgccatgggcctgcccgagctgagtggctttcagcagaccaggcggccactcaggcctgcgtggactggatgtgtccccagaatccacatgctgaaaccctcactccagtgtgatggtgttaggagagggggcctttgggggtgactgggtcaggagggtggagccctcggaagaggaccagcaccctcaggggaagagacacgggcgctgggttcccttctctgcttcgtgccatgtggggacatgggaaggcatcgtctgcaagccaggaagccggccctcacagaaccgagtctgcccgctccttgatcttgacctctggcttccagaactgtgagaaataaatttctgttgtttaaggcaccaagtcaaagttactctgttgtagttgcccaagtgagacagaacctcatgctacccagacaagtggagagagtcagcccccaccccacgggagggtggggatgggagcgagacagcgagagccttattctgagagggcgtcaggaggagggcaggaaggtgcccaggtgagtcaatttcccggcttggacacgcccctcttccctggtctcacacaggaaggtgcccaggtgagtccagttcccggctcggacacgcccctcttccctggtctctctcgggaaggtgcccaggtgagtccagttcccggctcggacacgcccctcttccctggtctcgcacgggaagtcgcccaggtgagtccagttcccggctcggacacgcccctcttccctggtctcgcacgggaagtcgcccaggtgagtccagttcccggctcggacacgcccctcttccctggtctcgtgcgggaagttgcccaggtgagtccagttcctggctcggacacgcccctcttccctggtttctcacagatcctcccactggttgaattgaagagagcatgatgtgtccatccctgcggctcggacgagctggccccatcctggagaccagccttttgcttaatcacacttcctggcatcccacctacagagatgaaatccatttaggtcaattgctctcacccaggggttttgttcccaagggagcatctagagagtctggagacagttttggtcgtcacagcagaggggcagatggtatggcatccagtgggtggaggccaggggggtgggggggcaccaagcaccctgcagggcacagggcagcccccacagagcacagcgtcatccagccccaatgccagtcatgctgacattaagaaaacatggtgtaaggccagtcacggtggctcacacctgtaatcccagcactttgggaggctgaggtgggcgaatcacaaggtcaggagttcgagaccagcctggccaacataatgaaaccccatctctactaaaaatacaataaattagctgggcatggtggtgggtgcctgtaatcccagctactcgggagactgaggcagaagaatcgcttgaacccagaaggcggaagttgcagtgagccgagatcgcgccactgcacagccagggcgacggtgcaagactccgtctcaaaaaaaaaagaaaacatggtgtaagttaacaatgtcctttcttaaaatgcaaataggacgggtgaggtagctcacacctgtaatcccagcacttcgggaggtcaaggtaggtggatcacctaaggtcaggagttgaagaccagcctggccaacatggcaaaaacctgtctctactaaaaatacaaaaattagccgggcgtggtggtgggcacctattatcccagctactcgggaggccaaggcaggaagatggcttgaaccctgggagcggagattgcagtgagctgagatcgtgccattgcactccagcctggcgacaagagcgagactccgtctcaaaaaaataaaaataaaaaaaaataaaagcaaatagttctggtatgttagccattcacattttagcatgaaacagcataaataaatggacttcctcccaagagttcctgaatatgtaagccaagggctgagaatcttcttgagaaaggagccaggagtccgggcactgggtgggggagcacccaaggagtgaggttgggtcggggcagcagtggagttcagcaaaggaatcctgggcgttctgcattgctggttcctagcctgatggaaaaatgctgcttttacatcatcgcaggacactggagccattgctgtgtttcactcactgtgagcttagtttgtgtggctctgggcagctgcaggatctctccgcacctccgcctctttacctgtgatgtgggggtgctgaccatagatagacaattgcggtgatggaggaagggcgcaaggtttgtaaagagtctccagcggtggcaggaggaggcgtcacgtgagcgggaaggtgaagatgctgagtcagctcctggctgccccatgggtaccgcaccccgctgtgtgccacccgcctcacacccaagatgaaggcctgggtgtcgggagatgcagagtaaagacagagcagtgggaggcagttaaggcccctaaagtgccagaaacccccacccctggaggcagccacagcctctggggagggcggggccacagggacccttttatacttaaaggttcctccccacaccctgaagggtaaaaggtttacagagactaggaaatggagagaggagatcttacagcctcccaccgtgggactcagtggatttctccttccccctcgcccgttccctccaactgcccagttcagcaccgccccctccccccaggcagctgagccctggaaccccacagctggcagctcgcttggcctgacctggcttcagacagtggctggcaggatcctcatagccagagcctggggcagaactgccagcccatgacaggctgtgtggcagagcctggggctccttccccctagatgttcagggagtgggcagggcagggggcgtgggtttctgcccctccaacccctccaggctggtcctgcctgggagctctgcctcctgccacacccacggctccagtcctgtccctgcaggaggcccgcaggctcttaggaactgctgtcctgcagcaggaggcctgcaaccaggccccacgtctgggcagggggtccaggggcaacggcttccttcctgctcccaccccacaccatccagggcccagaccctctctcccctcctctgggtgttggtgcctcctgcccctgcctcggagcccccacagaccaagccagggccctgatttggggccgctgaccccacctgcatctgctctccatcctggagctgttctcagcctcacacatcctcctcagggtcttccccacctcccccagccgacccccaaagtaagatgccagagcggcatgaagccaggaaataagccagaccccacagctcctccaaagacccctgacgctcctggttgaccctctcatggggacggggcttctctcccctcagcagagccaggagctgcctcaaggcccatgcacctgccagtccagcctgtcccccgggctgccttctccctccctggcttctggatagggaccgttgcccagtgcttcctgagtccagccacctggtgggcacccccagagactcagccctgactccaggcggccagccggcagcacaggtacagccggatgcccgacacacagacatgcaggcacaaatgaacagacgcacgagcacatacatcctgaccgtttccaggggctccaggacaccccgccaagttctcccctgcaccccacacagccacccacaggtatgcacagctcacccaggtcacacacacgcaccagggtatggatgtaaccctgtgcctgcagccccactccgggacacactaagtcacccacaaggacagtcattcccacagtcacagcacatgggaaatccccggggtcccattgtggaggcctgaccggctgccgcaaagcccagccccttggcagggagcccagaagccgctgctcaaacccaggactgccaggggcacccaggcccttccagccacgctgggaacctgcacggggtgggaaggtccttcccgcctgggttacaggagggcaccgggagcccgggagagacaagggcaagggacagatggcattcggccactcagcagggccccacagcctctcgaggcctcaggaatttttcggtgacgtgcaaagtgcagaccaaagccgccaacagggcgtcttggcggactctgttttaaattattcaccaacccggccgggcgcgggggcccacgcctgtcatcccagcacctgggaggccgaggcgggcggatcccgaggtcaggagatcgagaccatcctggctaacacagtgaaacttcgtctctaccaaagatacaaaacttagccgggcgtggtggcgggcgcctgtagtcccagctactcgggaggccgaggcaggagaatggcgtgaacccgggaggcggagcttgcggtgagcggagatcgcgccaccgcactccagcctgggcgacagagcgagactcaaaaaaaaaaaaaaaaattattcaccaacccaagtagggtggagctccttccgccacccatgccctccctgacttcaggacctgctctggggcctcagcggccccaggactgaccctgagtcccagtggccgccagtcagagccactctctgggccttggcgcccccttcagccagacagcagcccaggtgtccagccagctgcaagcatccatcaacaccccgctggggccctgaggctgcacggtcccacccttgcagggctccagggcactgtctgcctgtggtcccctgccctcaccccggccaccgccctccagctgtcctcaggctccccaagccgacacccacggagcgttctgtcctgaccccaaccccagtgagctctgcccccccacccccctacccccacctgctatggggaaaaacccaccctcctctggaccccagggagcagctacagctcacacctccactgcagcccctgttcagggagctggagaggcagccgcagaggccgcgtgaggccgtggtttcctttcatcctggcccgaccctcagggcaggtgccacacaaccccctttcaccgatggagaaggggcaccgcggcgtctctggccccattgcctggcctcaggtgccagagctgggaccccacccctcgccttccccactgctccgccgcctaaagcctcggttcacaaagcacggtccaggccccccggggctcccgagaaccttcgagaaagccccaaggtcaaaatctgttttcacaataatgccaaggcttctctctcccgtcctggcttggacagtggagttctcagaggccataagaggtgtgacactcccctgctttctcgtgtcttaaatatccacacgtttagtttctagcatactaaacagtggcagatgcaacctccctgacatttaacactgtgcaagggtcctaacacgaaagctctgagcattactgtcctggaggcaacgcagagctctgcctggtgtccccccagccccccttcctgattaacgagcacagcttgcttccctgggtctctcacccgccagaagctcctcctgccctcggtgggtctctcacctgccagaagctcctctgccctcggtgtgggtggcaccagaactccccagagaccgagggctggggaccccagggcggctttggccaagcccctgccctccccagagctgacagtgggctggacacagggtatcccctgtccggcatccagcagggcaatcctggcaccctgtgggtgctgcccccacccacgatggacaccaggagcccagtcccagatcctggcctcctccagccactgccggtccccaccccacagccccccacctgagcacgaggggcgcagcaaggcccggagccctgccaggcatcagacccaaggacttgggcctgccttcattaccccagaaggggagccgaggtcagagaccctcccaggagacccaccctccaggctaccacggccaggactctcatctgctggggaccccagtgggaacagggagtgctcccatctctctgccctccctgtgctcctccccaccccagaaacacacccacctggagggggccctgtggccccagcacagaccatggcaggcaggctgggcttgccccccaccagcagtgcctggtgaccaaggctgccagagtcatccagagttagcaactgcaactgggacatgggggtgaggggacccctgagcacctcagggaccacccaagggggattcctgcaactccagctgggggctgtttttcacttttgtcccatctcaggctggcaaatttctcccatttggccccagttctagccaggtcacgtgtgaaaggacaacttccttccagacaggccctgcaggtcccactaggcccctcccatctatgtggccccacagaggcccaggatgggccagggtccatcaggaacacctgtgtccttgggtagggccaccagataaaacacaggacacccagtcagatcagaattttagataaataaggagtaccatttttgtgtaaatatgccccaaatattttacagtaaacaattatttgatatatatccaaagtcccgacgtgactgggtcctgtatcccctccttggaggcctcgtggctctgatgttcgtgggttcaaatcctccccatctggggccgtgggctgccagcaccacctgggggcccaaactccctggttgctccactcttcctcccattctacctcccttttgtgtgggtttgagggaccccactttgggaatggagggagacatgagcaggccctccaagggcgcccctagacagtgcccccatcaccactgcctgtcacctgggctgcctcgtttccgtcctcacctagcacagtgggtccaacatgccccaagggtatcaggacctcaaccctggaatctgtggctgactccatgtggcaggaaaggatcttgaagatttggttgaggatgttgagatgggggcaatcccagattatcccaggtgggccctaagtgcagtcactcgcatcctcatgagaaggagatttgacacagaggaggagagagcagtgtggcgacagaggcagagactggagtgacgcagccacaagccaaggggtgtcggcagccacggcaaggggtgaagcagggaaccgactctcctggggcctccagaggagcagagccccatcgacaccttgatttcggcagggaggctggttttggcctgaccccaggaggcctcgccatttgccgtcattggtcgcagcatccctaagagactaaggcgctatgaggccctgcggtcagcctgcctgctctgcggaaccctccgagtcaggtacccggctgcaggctgggagctgggggctgggcgacagagaggcctgcctcagtgctgtgtacagggtcagggaacctgcccaccctccaccccaccctccctgcatcctcagggaacctgcccatcctccaccctgacctcacctgcatcctcagggaacctgcccaccctccaccccaccctcctccgcatcctcagggaacctgcccaccctccaccccaccctcctccgcatcctcagggagcctgcccaccctccacccagaccctcctctgcatcctcagggaagctgcccaacctccaccccaccctcctctgcatcctcagggaacctgcccatcctccaccccaccctcctctgcatcctcagggaacctgcccatcctccacccaaccctcctctgcatcctcagggaacctgcccaccctccaccccaccctcctccgcatcctcagggaagctgcccaccctccaccctgaccctcctctgcatcctcaaggaagctgcccaccctccaccctgaccctcctctgcatcctcagggaacctgctcaccctccaccccgaccttcacctgctgcagcatgactggctgtgggccggggccgctttcccagagcagggaggggtggaaaggagctgtcctcccctctccccacccctccactcttcccagccaaggtcggggcaggttctagcccagagagactagggaagacccaaagcccccagcccactgactgaagtcaccagcctcccgggttcgggggctggagttcctacaaccacgtacagagggcctggacctgggagcaggatggataggtacaggctgcagccacaggtgaccggcttagcaggagagtgagaccaggtgtgcggggccaggggaagaatgagtgtgtgtgtgacagtcactcgcggtggaggagccctcagctctcatgcggcccccagagatcccaaaacccgcagcctggttctgtggatctgaaggcaccattctctgccctgagtagccatggagaagcccctcaaagccacccaggccacctggccttcggatggggtcttgctgctgggccacggcctgggggacaccaggccctcctcagcgagcgctcagcgctcaccctgtgcagcgcaggggaccactcttgcaggcccaccgcccaccctggggtccccgggcagggagtgaaggatgctgggccggccacttgggcagggagggggtccggggggcgcggggcccaccccccagcagcaggcgcacacggctctggggtcgctcagtttattggtaaaacgggcactgagcgtggcgagcgctgggcgcggaagcctggggcgggggcgcctttcctcttgaagaacttccactggaccttgatggcgagcatccagtcgctgaccgagggcctctggcaagcggaggtgcagacatgcgcctggcgggggtgcggggcgccggaccggcgcgcggggcgggggcggggcgggggcccgggcccggggttcggagcgcggcaccgccggggagggtcgcgccgcgggcgcccgcgcttcacttgcccgccttctgcgccttctgcgccgacttggtgaccttgccggcgccgccgctcttcttctccacgttcttgatgacgcctacggccaccgtctgcctcatgtcgcgcacggcgaagcggcctggggggcggggggcggcgtgtgggcggggccggaggacttgaccccccccaaccccagggctctggccgggcgggggcgcaaccgcgtcgggaatgtcctcggaacacgcttagcgcagagcgcgcccctgtgaagacggccggcctcgcgggagtcctgcctgggcggctgctccacggtctgcggggcggccacggggcgggggcagccctaacgctgccactgggcgaccgcgggccttcctcactcgcggggcctccctcactttcggggcctcgtctgcacacagggcccaccccagctcgtctgggcagggtcacctgcactcagtgacacggaggccgtggctctcctgccatgctctgggccaagctccgcaggaaagggggcccactgctgtccccagcgccccatccccgcagtcctctgccctcagcctggatcagccacagcctgggggctgcacctccccggaccaccccggctcaccgagaggcgggtactgggagaagctctccacacacatgggctttcccggcaccatctccacgatggccgcgtctccagacttcagggacttggggttgtcctccagcttcttgccagagcgccggtcaatcttctccttcagctccgcaaacttgcaggcgatgtgggctgtgtggcagtcgatgaccggggagtagccggcgctaatctgccccgggtggttcaggatgatgacctgcgagcggagccacaggcggccatcaggcacatcggcggtgggcaccgggagggcgccagagcggggctgggaggcccagtcaccggcgcccctgcacgggctcctgggcccggagtgctgactggagggggctcaggctctgaggacccagcccccagacctgaacctcaacatcctcattaagcaaaagataaacaactgagattcattgtttcgaaggggcaggggcagcacttacacggccaaccccagctggaactaaggcgggggggtgacaaaactggacctcaattcctgtgtttcagttgtatctcaataaagccacttttaaaaatcatatgaagaggccaggcacggtggctcacacctgtcatcccagtactttgggaggctgacgcacgtggatcacttgaggtcaggagttcgagaccggcctggccaacatggtgaaaccccgtatctactaataatacaaaaattagccaggcgtggtggcacatgcctgtaatcttacctacttgggaggctgaggcaggagaatcacttgaacccgggaggcggaggttgcagtgagccgagatcgcaccactgcactccagcctgggcaacagagcgagactccgtctcaaaaaaaaaataaataaatcatatgaagaggccagcaaagaggggcaatgaagactgtagagaataaaagtatgacagagatgtctcagacagtaagttaacaaaagcgtttttctaggacgaatgtaggacctcaaaggctgggcatcccagcagtgcagcgtggaagacagacccgcgattgcacacaggctgggagccacagggcctgcacccctcccagaactgattgatcccctcgttgagtgctcggtggccccctcggtggtatgcgggtcccttttctttttttttttttcttttgagacgaagtctcgctctgtcacgcaggctggagtgcagtggcgcaatctcggctcactgcaacctccgcctcccaggttcaagcgattctcctgcctcagcttcctgatagctgggactacaggcacgtgccaccacgcctggctaatttttgtatttttagtagagacggggtttcaccatgttgaccaggatggacttgatctcttgacctcgtgatctgcccgcctcggcctctcaaagtgctgggattacaggcgtgaaccactgcgcccagcctgagggtctggttttctccccacgccaggccacctgccgacagcagcctcacccaggacagtcctgctgctgtccagcaggcgccagccccctggacccagcgcagccccccacctgggaggtgaactgagcagcctcctgcggcgggtcagacttgctgtccccacacacgttgccccgccggatgtccttcaccgacacgttcttcacattgaagccgacgttgtcgccgggcagagcttcgctcagagcctcgtggtgcatctccactgacttcacctcagtggtgatgttcactggcgcaaaggtcaccaccatgcccggccgcaggatgccggtctccacccggcccacgggcaccgtgccaatgcctgcagaggggagggggtgtgaggggaaggtggggcccgaggggatgctggggcaggatattcggggacagagcctggaaaccaacaaagcctgggactggatccccccgacaggcctgggggttggggccacatgggcggagtgcaggggaagggaggccagggacaagggcagacacagagattccaagggaagtgggggctctcccacccagctggggaaataagaggctgagcagcagagctcccaggaacccacggaaaagccacagggacagagaagcgggaggatgggcagagaggggctgtctgaacctggggtcccatccttgcccccggagagcactttccctcaaaggaggcactatgggacccctcctttgtctgaggactcctccctgtgagtgtgggcggggcgactgactgcttctgcctggggcctggtggccctgctccctgctccctgcaggccctgctccctgctccctgcaggctctctgggccccacttggatgctgcaggtctctatcactaaaggggcctctcagccagatgcagcacaggcacagcggcacatgagcgtccctggcatttctcatggatctacttaaaccaattgtgcagctgccacatgggggtcttgtccccccccaggctactgggtctccaccctcacctcccagggctgtgagggaggcctgttgtagcctccagccaacttcactgaggccagtggctgtgctctgtgctggggtgagcatgatgcccccacagtgcacacagagatgcctgcaacatctttggctgcagcccactggctgggggtctcctatcagtgcccttctctagggtctcagatttgtttatggtttctcttcttggtgggatggatggatggatggacggatggatggggaggtgggtggatggatggatggatgtatgaatggggtggtagatggatggggaggtggatggacagaaggatgggtggggagatggatgagtagggagatggatggatggattggtggatggatggatggatggatggatgaggaggtagatgagtggatggacagaaggatggatgggtaggaaggtgggtggatgaatggatggatggggaggtggatggatagatggatggatggatggatggatggatggatggatggggggatagatggatggatggatggatggacggacggatggggaggtggatggatggatggatggatggatggatggatggatggatggatgaggagatgaacggatggatgagatggatggatggatgatggagggaaggatggctgggtggggagatggatggatagagaggtggatgggtggatggggagatggatggatggatggatggatggggaagtggatggatggggaggtggatggatggatgtatgggtgggtaggtgggtggatagatggatggatggatggatggataaatggatggatggaaggatggatggataggtaggtgggtggatggatggatggatggatgtacagaaggatggatgggtgggtaggtgggtgagtggatgaatggatggatggatagatagaaggatggatgggtgggtcaatagatggatggatagagagaaggatggatgggtgggtagatggatggatggatggatggatggatagagagaaggatggatggttgagacaatggatggatggatggatggatggagagatggatggatggatggatggacagaaggatggatgggtggggaggtggatggatggatggaaggatggatggatggatagagagaaggatggatgggtgggacaatggatggatggatgcatggatggatggatggagggatagagagaaggatggatgggtgggacaatcaatggatggatggatggatggatggatagagagaaggatggatgggtggggagatggatggatggatggagaggtggatggatggatggatggatggattgatggacagaaggatggatgggtggggaggtggatagatggagagatggagggatggttcgatagagagaaggatggatgggacaatggatggatggatggatggagtgaaggatggatgggtggggagatggatggatcgatggatggatggatggatagatagatggatggagaggtggatagatggatgggtggatggatggacagaggatggatgggtggggaggtgggtggatggatggatggatgtgggatggactgtcccacagaaagtgtgtggtaaggggagagattggagacagcccagtcttgagatgccttgtaggggcccctggtctagggcaggcagagctggccaggcaggagctccagcacagcgcccttgctcaccgccaatcttgtacacgtcctgcagcggcaggcgcaggggcttgtccgtggggcgcgtggggggcaggatggtgtccagggcctccagcagggacacgccgcttgcgttgccctccttacgctccaccttccagcccttgaaccacggcatctggaccaaagggagaaaatcaatccgttaagagacattggtggcctccccaccctcaggcctccccagggtgcttccaggagtactgctgttcaggctaaacttgcctcgtgccctttgagatgaggaatttccccaccctgctcctccccagcccatagccccagcatcacagggactctgggaaggagatccctcttaaaaggaggaggacaaagagggaaagcacccttcccagcccaggctgctcaggagttgctgacactgtgaacaaatccccagtccagccccaagtccccgaaaccccgggcccctgaccatcagctccaggcagggcagatgacttgactaggaggatgctgagtctggccaagggccaggccagggacagagctggaggagcctcgccccaccctagcttctggacaccgtgctgcctccgagcttggcccagccttgtccggagcttctcctagtgtggcccccactcccatcccatgaagcctccctctgggccacctgccacaaacagggagcaggggagggggccggcagcacagtgccccagccccccagggcctgtgtaagcacgagccacctagcagctcaggccagaggggagtgcagggtccctgatggctggaggcctccctggggaggggagagtggcgttcgccacatgataccccatgaggaaaacgccatcacaggtaaacaacaccgagcctcgtgagatggaggcggagctgggggagtccctcccagttctgtccccagacctcagctccaggctcagtgctgctggtctgtctccctgctgtctctagactccacacctgcaccctcactgtgggcagcgacagtgctggcagagcctagtggtggccattctggggtctcctctggcttggagaaccctgggaacagtctcaggttctgcaagtgtctccacgcgtcacctccagccaaggcagagtccctgggctacagactgttcgcacgttgagctcccaggtgaccggccaagagccaacccttggccatcccagcaagcccagaagcatgcacacttcccaaagcccaaccctgctccaagatcccaggggaggcagccaaggaggcccccacggcccagcccaaagcccctgcacggtgtccaggaccaggacaatggcctggcagagatgaaaccgaccgcccccatggcagggctctggagaccaagcacatgggcctggtgctggaggccgctgcccctgctgtgttgacatcgtagatgggccctggccccggccagccgcgtgggaggctgagtgtaggagcaaagcccggtgctgaggggcatggggctccccgccgggccctgagccagttagggaaacccagcaggtttcgaggggaacctgcatttcccggggacaggccctcgacctccccgtgccacctgccggtgcctcgctctgggccagggggtccagccagctcccgtggcccgccccgccctagccgccactcacgttgggggagggctccagcatgttgtcaccgtgccagccggagatgggcacaaagggcacggtggccgggttgtagccgatcttcttgatgtaggcgctgacttccttgacgatctcgtcgtagcgcttctcgctgtaggccggctctgtggagtccattttgttcacgcccacgatgagctgcttcacacccagcgtgtaggccagcagggcatgctcccgcgtctgcccattcttggagatgcccgcctcgaactcgcccacgcccgccgccacgatcagcactgcgcagtccgcctgcccggcaggggacacagtgagccctgccccgcctgcctggcaggggacagagcgagcctggccccacctcacttccaggcctctccaggcagcgggctggggcctgagcagcccactggggccttggggagggaggcatgggggtccccacttcaagggcagcatgggggctcatcgccaggccctgggtcaggggaccgaggttcagccctggctccaccaccagtgggctgtgtgtccctggacaagtcactcagcctatctgctcctgttcctcacttgaggacggatagaagtcacagttatcaaagcagtttggaggtggtggcatgtgtcctgctgtctgcagggtgctgtgtctggggtgtccgtgcgtctctgtgagtgccctgaaatgtcatacagtctacacctggcgggtggcacctctgcccactgctcactctccccatcctggcctccaacccctccatgtatgaaggtgtgtccacgtccccatctgcccccatctatctggggactctgacactggctggatgccttcacaggcactggttcagatgccagagcactggattcatccttaggggggctctgagccagactgggtgagggtggcccaggtgaggggtcccctgccctcacaggaagcacaggagaccctaccatcccagtgaccccaggggcccccagtgtcccttgaagggtgcagcggcctctcccccagccccgcctgctgtgccctgctcacctgggatgtacccgtgatcatgttcttgatgaagtcgcggtggccgggggcatcgatgatggtgatgtagtacttggtggtctcgaacttccagagggagatgtcgatggtgatgccgcgctcacgctccgccttcagcttgtccagcacccaggcatacttgaaggatcccttccccatctggagcgggtgagggtcacggctgagggcgggacccgggacccaggagtccctggtggtgcgagctgcttgttacagcagagtggccgcgagaggcgggagatgggctccagcacccccttgctctccgtcggggtcctgggacgccggccccctccgtcgggaccccacacccagaccctgccccccagggccggcctccgcacctgctccgaaatgggcgcggctacgcaggtccaccagcaggtggcgcaagggcctgggagtcgctcgctctacgagcgaagccgccagatgggataaacccctcccgggcgagggctcccctttatctgaagctgcggacgcccccagatcccttcctcaaccagaggccaataataccaccgtgtttggggctgtcagataaataaccctctgtgtgtgtgtgtttttttaaggtaaggagaaaggaaaactgaatgaggtcaggaggagggcctggccacgcagctccttcccgctgctccagcctccccatccctctgaggcttctcctccccttcctcgctctgccggacacgggaagctggggggcctcggccagtgagacccccacagaaggggacgggcttcagtcagggcagcagcggcggtcactacccagctgggcagaactcctcgccagggcctcgcacagacaggactctgccctccaggaggctgcccagtctggagcagacccagatgggacccagctggggcctgaaacagcggccctctgaaacccccgcctcctcctgacaaggccaggtaaagggtgatgcagcccaaactcaggggtgcagctcagagcacccccaaccccgccagggcagaggctcagcccaggacagcgagtgcccccaccttgggccctggcctccgccctcatcatccaggtgagagctcccacaggccctcccaggagtgggcttctccccagagtcctgggtgggggatggggatcagagagcagaccccgtctcatgaccgctccccaccaccgtctcagccaccaaagagaaatcgcttcaaaaggtcagctaggaggtcacctcatccaggacccccaccccagggctgccctggacagcagccctccacagcccagcacaagaaaatggagcagacgggccggctgcccatcaatcagctattaatagtagcgtgtgccctggcagggccctaggacaagtgagggcagtaccatctccagccccagccttggccctggggggaagggggtaaggctccagcgccctccagccccagctcaacatggcagagttccagagccttctgcagaccctcccaggtcacctccctcaccacagggcaagtccggcagctcgatggccacccctcccccaccaagctccccctaagagagaggctgccccaccagaccctctgaggcctgagtgccccacagcgggggtccctcctgccctggaggaggtcacctgagccccatgccctggggctgggagatgccaagcctggccaccacgggagttgggggttccttctcagggggccaagaccatagcctggggagctcacctcagccgcctccttctcgaacttctcaatggtccttttgtcaatacctccgcatttgtagatgaggtggcccgtggtggtggactttccggagtccacgtggccgatgaccacgatgttgatgtgggtcttctccttgcccattttgctgggagtgtgaggggctggcgggacccggggtgctctggctcagggcgaggggggctgcagtgattctgtggggccagtggtggtggggagaccggtgatggggagccccagggggagacaccagcagagactgtcctggcacaggctggacaggcatccctgcccacaaaccaagcccccatgtttggtggggagggaagggcccccacccacagctgggcctggccagggcaagcagaggctgtgcactgcccccaccccacacttgagcccaaacagccccatctgctgtaaataactgggcgttggagcccgcgggctgctccttgggaaggggttagccaccatttggagagaccacgcagcgccaggctgggtacgtccgtgaccagcagagccgggtgatgagtcacctgcccagcgctccagggccctgtcctgcacgcgcactcccctccccggcggcagggccagggacacggcgccccacccccacccgctgccaccggggagagatggccactgctccccactcccctcctcaggcagggacggcgccatcttcccctcatccctgcccggcaggctgggccagagccccgacggagatgcgctgcccagattaggaacccagaatagctctaggcacccccctcccggactctcacagggacagacagcggccgggaggtgggggtccctgttccagcctgaggaaggaggacccggccctgccgagcccagcaagtgccaggtggagatgccctcggccccgtgggggtatagggggcaccctccctccccccctccctgtgactcaggaccctgggtcacagccctgtcccatcacagaggtcagtggagaaacccacgctgctcctcgcggacaggtggctgggggagggaaagaggacagaagccaccctggggtgggaacacgggtgggggtggggaggccagggcccccagatctcaccacctccctcagcgtcctctggcccagcgccccgaagcccgacccccatcagcccccggcccgcagggtccccgcggccccaaggtcacggctacggggcgatcgccgcccaggacccggccccgccgccccgcgccgccccccaccccgggcccagcccggccgacgcggggacccccggaagccggactccgggcgcgcgcgggggcgggtgcggggcccggccaccctctgccccccaggaccggccccgggggtccctcttcggaagacgggggcgggggcggaggcccgggggccgagcgtccttacccggagccgaggtctcagccagagggactggcggcgccggcgccggcggttttatctccgggagggggtccacctattgacggtggcggcgcagtgcaccgcgccctgcagcacgccaatgcggaaccgcgcgggagggggcggggcgcggacgcgcgcgggcgggcgccacggggacgcgaggcgatgcgggaggcgcgggctgcaaagacggacgcgggaggcgggggagaaacgcgccgcgggcgggggcggggcggggggcagggcagggaggcggcgggagggagggaccgggacggagacggcgcggggagagcgcggcgggcccgggagacggggcgagagccggctcagggcaggaacacgcttgagccgcgaaaagcggtccccggggacagggcagacgccgaggaccggagccggcaggcgggggaggggagcaggtgggctgcagcctgggagacgagcctgggtctaccggcccctccccggccctgctcatgggggacgccccagaaccaacgaagcccggctctgaggggctctccctaatgaggcccgggggtgcaggcctcagggtggaaatctgctggtttccagtccctgtcctcacgtgcctgccctcctgggcgcaccatgacaggccccgaggatccagcgcagaaccaccctccccctgagaggctggtctcccacggtgcagggaacgccggaagcccgctcccagacccactgacatcttccagggaccctcccctccgggtgcgccgacctccggctgctgctgggaaacagcgccagccaagggcgagtcagatccagacagacccaggcccccccgcccagcgccccaccccgctgcacctcagcgccttgtagctgatgctcatatggggtcaggatgccaagccaaagaccgggccacgctctgtaggaagtggggagtccctgaggtcctggcacacgcgggtaatgaccaacgtgggttgtgaggaaggggatgtggcagccatgtgttgtgtgaagaccaaggttaggggctttctccagaccccaagatcctgtcgtctcacccaggtattcaggtcttccctcccacgctgcccccccacccccacgcactcggatcttcctgccagcggggtctcgggaggtgtgtgctgagtgggggcagagccctggcacctgtcctctcagccctgagttcccactgggtgttgacatggaggccccgggtcgggcccagcagctgcgactgggcaaatccatggggatccccagcgactggacccctacctggcctgctggcaggtgtgaggaggaaggaaaggtgggggcccagggtcggggccaaacagttctccccagcctgtggagagggcctctcaggaggaccctggtctgtggctgcgtctgccccataggagtccagggacttgggctcctgggccacaggcaggagaggaggcagggagggcctgctaggtgccccggcacttccgagtgctgccgatgccgtcaaacaggagccaggaataaaaataaccgcctggcaagaaagcaaggcccgccccaccccacccagctggtctctatatttaacgcctcccctgcagcctgaaggttaggcagggatttggaagtgggcttgctgcaggtgctcgagtggcccaggccggggtcccggggatgcccaccccactcccccaagggatcaccaggactctgggctaccttttccagacaccccttccccctcggctcccggctcacccatagcagtgccaggggctcacatgtgccgtggggccttgccacccacaggagtggcccctgagagtggaatgtggcaacctccccaaagcacctgtgtgctgactctgggcaagggtgtcggtggctgctccaaagggtctcccaggcgccaggacacgtttggtccacggtgtggcccctcggggtcctgggagccaccgactcagttccgcagacacttggaacacacagctaacggggctgcggtcacaaggctaaacactaacacactgatggttccgagccaccgcggagactgaacaggactgaatggctactaactacggaatgctaactgctgaataacggcagtggcctgaccacgtccccaaagtgcacgagttgtaacttaatccccaatgcaacagtgttgggggctggcgctttcgggaaggagtctgggtcataaagggtttgcccttccgaatggatttgtgccctataaacaggactcatggcagtgggttctctcttgctcttccgccttctcccatgtgaggacacagcaagaaggccctaccagatggcagcaccttgatcctggacttcctggcctccagactgagaaataaacttctgtttacttataataatttataaatttataaagcaaactttataaatgtttaaatttaagtaatgtataattacccagtctcaggtattctgtcatagcacaacaagcaggcaaaacacttgtcaatggccgggtagcaccaaatgacttcaagtaccaagcatcctaattagtcacagccaagtcgcccagctgtgtgagttcacagtgtgggggacgggggacagggggccgtgcacgtgcacagtgtgcggggatgggggctgcggggacagaggctacaaggtaggccccacaaggctggctggaggaccttgagaacctgtgaggcaactgggcacagaaaggccaagattcctgtccaaggacacgcagcaagtaagggggcctgtggcctgtgctttccctgccctcccccaggtcaggacttgggcccctcttcttgcatctgagtccctggtcacagtgccgtcctcaccaacaacctggggggggtggggggaggggaaatggcgagtcaagagggcaccagccaatcagggcttccctgggggcaggccccgcccctcctcgacccctcccagagcccccaggccccgcccctccttgccgcctcccagagcccccaggacccatccctgagctgtttggggagacacaggcaaccccttctttggctggctagggtttcacgagcctcgggaaagaagatgcagctaaaattaaccgctatcaagctgtcagccctggaaataaacctgcctcccattggctgccggtgacgtcactgctgggttaataatagccgccgagtgcctaacgaaccacctgtgcatggggcacagccaggccatcaccccggggccaccgtcgcaggcaggtggaggctggcagcccagaggcagacaggggcttggaggcagggtggggagcaaggccaaggccgctctctggcccccagtgtcacaggatgacctcagccctggcctggccccagagcaggtgtggattcattttccggtcacggagcatctcgtctgctggcccacctgggccccctggacggccaccaggacaaggcccacccccgcggccatgccttggggctggctcccaggggactgagcatgcccttgaggcagcgaattaaacagtctccatggcagcagaggagctcctgcctctggagcctcccttagaggagcagctcatgtccccccagatcagagaagctggggctgggctggcagcgggcaaacatgcctgcaggtcaggccacagaccagggccagccacggccccgacagcccaccctccaacccggtatctgggtgtgcctgaggcagacctgagtctaccagggaggcccaggagggatgcagcccctccgccagggggaagggcggcctggcctgccaccccgacctgcaggccccagcagggagcgttgccatggtgagaggcagcagcagcaggatgccctccctccaggccctgctgcccgggagcccagcacccaccctggtggggagcagacagcacgtgctcctgccgcaagcagcactttctgggcttctgggcttccagctgcagtccccgctagcccctcccggcccctggccattacagcccattgcaggctgggaggctaaacaggaggccggggtcaccgaccagggtggggtcacctcttggacccaagaagggcagcccctggtgccagcacaggggcgctgtgccctccagtgcccagaggcagaggggagagcctgggtagggtctgcagaccattgaccctacagctgcctcctctgggccctggaggaagagggggccatcaattgtgtctcattctgcagctggtccagagagaatggggggtccaacgtctgtggtcaggtctggagagaatggggggtccagtgtctgtggtcaggtctggagagaatggggggtccagtgtctgtggtcaggtctggagagaatggggggtccagtgtctgtggtcagggccccctcaagggcccactaaagcagagctcccttcctgggccccacccaaggtcccatctcctctcctatgtagccggcaccaggttcaagggggatctctcaaggtgggaaattgccctggggaacctgaagttcattagcagctctggaggccctgttttcacctctttgaatagcccttccctcaattaggcagctgggaatcttatgaagggaataacaggaccctgcctgcaccctggggatgagcctcccaggggctgccgcccaccatcgcctcccacagagattcagagcctccccacccctggagggacctccccacacggccaggaaccgagcagctgggccagggcaggaggaagggcagggagaacacagaggggacgtctgcctttttaaagacgtgactttgagcatacatagagaaaagtgacacactgcaaatgtgcctgatgagttatcaccaggaaaacacacccagaccaagaaacaacattccctcctgcccctcggtaaaggtgacttctgacagcacagatcacgtttgcctgtttttaaactttatataaagggaacacaatgcacagtgtgtatccttttgtgtggcttctttcacacacgaccgtgtctgtgagatgcctccatgccgtcccgtgcagcaggcatttgttcattttcatcactgtactgcattccacttccagttctgaacgactacaaataaagctgctacgaacacttgtgtgcgtctctcttgtgcgggtgtacctgctcagtacacaccccaggatgtttcagccacatgataggtgcattatgccaaccactagtttattgtcttttggctcgaaatttaaccttcaatacctgctccacagcagtggacagaattactttaagcatttctcctttacactgggcagattcattttttttcttttctttttttctgagacagggtctcactctgtcccccaggctgtagagtagtggcacaatcatggttcaccacagcttcggcctcccaggctcaagcgatcctcccacctcagcctcccaagtatttgggactacaggtacacaccaccacgcccagctaatttttgtattttttatagagatagggtcttgccatgttgcctaggctggtctccaactcatgggctcaagtgatccacccgccttcgtctcccaaagccctgggattacagacgcgaaccactgcacccagctgagattcacttttttgaggaaggcaataaagggtgaatttgcagctggaaataaatcaattgataattggcttttaccccttgagcgtgggttgcattgtcctgtttcttcgtgtgtctagtgatttttgactgaatactgaacatcatgtggagagtctactctgcttcctcctctgaagctgtcggtgtttgctttgcaggttggttcactgctgggccctgtggacttgttctcatgctttgtcagtgtcgatgtcgaaagcccaaagtgtttcccaagtcctgctaccttggtaagactcaaccctcaatctcagtctcccctgcagatctctgtggggcttggtctgaactttcgttaggtgagtgtggagtaggcattattgtacattgtagtcctttctcctcaaaaaaaaaaaaaaaaagtaaggtctctccactctagccaggtccaaatgccaaatgccaatgccgcccaagtctctccactctggccaggtccaaatgccaaatgccaaaatactgcccgacacagcttgtcctctactatctttgttctgctctaacctgggtggatacaacctcaggtaatccctggtgagtcgcagccttgagtactttcctccgagaaacactacggtttgtgtccagcccatagaacacagaaaggtgataagtcactctgtgattggctgcatcattccaggctctgtcctgggggacggagcagcaagacacccctgctgtctgtgaagatatggctgttggaaggcatgggaggggcctcgtatcagggaaccagtgagtggccccaggctgccagccaacaagaaagcagggacctcagtcctacagccacaaggaactgaattctgccaacaaccacgtggccttcaaagaggacctcaagcttcagaaagaaataccaacaccttggtggcactcttgaaaccccgagccacccagcggaattgtgtgtgggctcctgaccccccaaaactgagaataaatgcatgttttttaaagctactaaatcggtgttgattggttatgcagtgacggataacagcacagggcctatagtcactgctctctggtgagcctccggcacctcctcaccctcagccacaggcttgcagaggtcccaagcactccccaccagcaacatgcacacctaagcccctcactccagtctctgcctctcatcccagggggactgccgtgctctgcctggagccctgcttgtggggttatggccaaggagagccgggagtgtgggcgcctccaagcaccctctcggtcttgtgctgtcctcaccccactgcctgaagagagcagcgcacgaattttgtctggtctcagagtcgtttctggagggagacgtacctggcagcagctactcccccgcaactggaagcagcggttgactccacatcaatacaaagacaaggttacttcagtctttttacttttatattttattgttttactattttcacggtatatacattgggcctgtctttttaaaaatcttttatgacactgaaacttttgaagaatgcaaaccggttgttttgtagattgtccccgcattgagcgttcctgacatttctgcatgaacagattggcaccaagagccaggcatccttcccagcactcgggacgctggctgcccaccagcggcaacggtacctttgatcctctggttaaactggcatccacaagcttctcacagtaaagttaccactttgccctttgtaactgataagtaagccgggcacggtggctgacacctgtaatcccagcactttgggaggccaaggcgggtggatcacttgagcccaggagttcaagaccagcccggccaaaatggtgaaaccccatccctactaaaaattcaaaaattagccaggtatggtggcacatgccggtattcccagctactcaggaggctgagtcacgagaatcgctggatcccgggaggcagaggttgcagtagccaagatcatgccactgcactccagcctgggtgacagagtgagtgagaatctgtctcaaaaaaaaccctgaaaattaacaaggaagtacttttgatactggtggccaggggaggtccccaaatgcgaatgggaccttgacccaggccagtgtcctgcctcttaacaccatcacaaaacgaattcaaggatgagttaaaaaataatgaaagtagagatttattgcaaagcaaaaagtacaccctccagaaagcagagtgtggctgggtgtgaaggctcacgcctgtaatcctaacacattgggaggctgaggcaggagttcgagatcagcctgggcaacatagtgagaccctgcctcataaaaataaacaagcaaatagaaaaaaaagtcaaagaagaaaggggagtatgggtgttctcaagaaagtgagtcgtgaggcagggtttggggcccctacctttaatgggtttctttaaccaaggagtggaatattcataaagatttctggaaaaaggtgaagatttctaggaactgtggtgccacccttttttacaccaaatatgtgtgttcctggaactgtcatggcactgccgagtgtgatttgtgtgttgatgagcatataattaggtcaccggtgaaacccaggtcaagtccgctgccatgtgggtccagtcgtctcggccagcgtggcccagtgggtccagtcatcttgtccagctcggcccagtgggtccagtagtctcggcccagctcggcccagtgggtccagtcgtctcggccagcgtggcccagtgggtccagtcatcttgtccagctcggcccagtgggtccagtcgtctcggctcagctcggcccagtgggtccagtcgtctcggccagcgtggcccagtgggtccagttgtctcggctcagcgtggcccagtgggtccagtcctcttggcccagctcggcccagtgggtccagtcgtctcggcccagctcagcccagtgggtccagtcgtctcggcccaggtcggcccagtgggtccagtcgtctcggccagcttggcccatgtcctggtcttcagtgtctggtcaccccctggcctctgcagctttttcaacagctctcttttgatagccatgaaactgctacctggaatcatctgttctcctgcggccaccctgtcgtagtcctgtctcactttgggttaggtaaatgtcctgtccctcatcagaatccatctctggacttagcattcgtggatgattcatggatcagtgtttactatgatggctgtgcgtcttaaatcattgttttatctgtcattatttttttgaattgtcacacagtaagttgacttttttggaagatgtacgactctgtgaatattcacacacacgtattgccaccgccgcactcaggaagcaggacatcccacgactcggaaatctccccagacataccgtttgcggtcacccatcctcttccccctggaaaccccatttgttctaagaatgtcagatgaggcccaggacgtagacgcaccgggttgcgttgaggtctggcttttctgacttggcacatcgctgtggacacccacccagggggtttcacggatcgacggctcgttccttctatcactcagcagtatctcgtacacgacacaccacagtctctgttcacccgcagaagaacacctgcaatgtttccaggttgggcagctatgaatagagctcccataaacatctgtgtaccgtcctttaacgtaaacctgtttgaatttgtcttggataaatgctcagaagcggaattgctgggtcatacgtcaggcgcaggtttcccttcaccagaagctgccgacctggcttcgggagggaaacccgcgccgtctgcacccccaggggagttcccggagcctcacggccgctgcagcacttggtgtccttggtgtttggaaatttttttttttttttcagctgctctcataggtggcctctcatggtgcttttaatttgcatttccctaatgttgctgaagaacatttcatgggctagttagtacacggtctttggtgaagctcccattaagtcttttatcctttttttttttttttttttttttttgagatggagttttgctctcgtcgcccaggctggagtgcagtggtgcgatctcggctcactgtaacctctgcctcccaggttgaagcgattctcctgcctcagcctcctgagtagctgggattacaggcatgcaccaccaccctggctaatttttttttttttttttttaatagagacagggtttctccatgttgcccaggctggtctcgaactcctgacctcaggtgatccgcctgcctcggcctcccaaagtgctgggattataggcgtgaaccactgcacccatccttttatcctttttttaaaacagctttattgagatatcatttacatgccataatattcgcccatttaaagtgcatgatgcaatggctcttagcatatttacaaagccgagcaaccatcaccataatctaattttagaacatttcatcaccccgaaaagaaaccttgtaccatttagtaatcagtccccattcctcctccacctctaaccaagccctgggcaaccactcatctgccttctggctccatgcatttgcctgttctgggcattttgtatgaatggaaccgtgcgcagtgtgtggtctttgctgactggctgcttctgggtttggtttctctgcgtcgcagcctgcgtcagtgctttcttctttcttattgccaaacaatcctctgctgtagggacgggccacattttgttcatcattcatcagttgatggacatttgggttgtttccacttttttttgagacagagtcttgctctgtggtccaggctagagtgcagtggtgcaatctcggctcactgcaacctctgcctcccgggttcaagtgattctcctgcctcagcctcccaagtagctgggattacaggcacctgctaccacactcgactaatttttgtatttttagtagagacagggtttcgccatgttagccaggctggtctcgaactcctgacctcaggtgatccgcccacctcggcctcccaaagtgctgggattacaggcatgagccaccgcgcccagcctgtttccactttttagctaacatgaataatgctctatggtggtacaagttttttgtgtgtggacacgttttcatttatcccgggtagatattgaagagcaaaatcctgtgactatatttaaccttttgaggaaatgccaaaatgttttccaaagtggttacactatttcacattcccagcagctgtgtagcagggtttccattcctctgcttttattattgtgtgtctttttatcagagctctgctgggtgtgaagtgttgtctcattggggtttggatttgcatttccctaatgactaaccctatggatcttttcatgtaccttttagccatttgcatgtcttttttgcagaaatgtctattcaaatccttgacttttttttttttttttttgagatggagtctcactctgttgtccaggctggagtgcagtggtgcaatctcggctcactgcaacctctgcctcccaggttcaagtgattctcctgcctcagccccccgagtagatgggactacaggcacgcaccatcatgcccagctaaattttgtatttttttgtagagacagggtttcgccatgttggtcaggctggtttcgaattcctgacctcctgatccgcccgcctaggcctcccaaagtgctgggattacaggcgtgagccacggcgcccagccccttggccaagttttcaattgaattgtttatttttattttttggtgttgagtcttgagagttttctatgtattgtggatacaagtcctttgtcagttctgtgacttgcacatattttctccaagtctgtggcttgtctttctaatctcttaacaggatcattcacaatacaagttttttatttcagtgaagcccagtttatccatatttttcttaagtggatcatgcttttaatattggctgctcaggtcacaaagattatctcttgtactttcttctagatgttttatagtttacattttatatttagatacattatccatttgtatagttaatctttgtataatatgtgagatttaggtcaaggtttttgtttggttggttgttttttgttgttgttgttttgttttttttttttttttgcatgtgaatgtcaaattcttccagcaccatttgttgaaaagattatactctttttttttgaaacaaggactcactctgttgcccagggtggagtgcagtggcatgatctcagctcactgcaacctctgcctctcgggctcaagcgatcctcccaccacagcttcctgagtagccgggactgtaggcacgtgccacgaagcccagctattttttgtagagacaagttctcaccatgttgcccctgctggtctctaacccctgggctcaagtgatccgcccgcctcagtctcccaaagcgctgggattgcatgcgtgagccactgtgcccggcagaaaagatgatacttgctctgtcaaatcactgtagtgcctttctccgagaacatttggtcacatttgtgtgaggctgtctctggactccatcctgttacactgatgtctgtatctgtctcctcaccaagacctcactgtcttgttttttttttttttttttttttttgagacagagtctcactatgtcgccaggctggagtgcagtggcacgatctcagctcactgcaacctccgcctcctgggttcaagcgattctcccgcctcagcctcccaagtagctgggattacaggcacacgccaccatgcccagctaatttttgtatttttagtagagacggggtttcaccatgttgggcaggatggtctcaatctcctgacctcgtgatccacccgccttggcctcccaaagtgctgggattacaggtgtgagccaccactcccggccctcactgtcttgttttgttttattctgttatttttgtttttctaagacatcttgttatcgcacactgtgttcaatattgcgattttgtagcaatttctaaaataagatcatggccgggtgcagtggctcacgccattaatcccagcacttcgggagcctgaggcgggcagatccctgagcccaggagttcgagaccaggctggccaacatggtgaaaccccgtctctactaaaactacaaaaattagcggggcgtggtggtacatccctgtaatcccaactactcgggaggctgaggcacgagaatcgcttgaacccaggaggatgcagtgagccaagattgcaccaccgcactccagcctgggcaacagagtgagactccatctcaaaaatataaaataaaataaaaagtaaaataaaataaaatgaggtcgtatatggaaagaatagtcttttcaacaaatgacgttagaaaatctgcatatccacctgcaatataatgaaacccgctcttccctcacctgtcaatcaatatcatgaagccggctcttccctcatctgtctatcaatatcatgaaaccacctcttccctcacccgtctatcaatacaatgaaaccacctcttccctcacccgtctatcaatatgatgaagccggctcttccctcacctgtctatcaatatcatgaagccggctcttccctcacctgtctatcaatatcatgaagccggctcttccctcacctgtctatcaatatcatgaagccggctcttccctcacctgtctatcaatatcatgaagccggctcctccctcacctgtcaatcaatataatgaagccgggctcttccctcacctatatatcaatatgtgatctaataaaaatatactactatttgaagaaaccataggtgtaggctggacacagtggctcatgcctataatcccccagctgtttgggaggctaagatgggaggatcacttgagcccaggagttcaagaccagcttgggcaacacagaaagaccacatctctacaaaaaagtaagaaattagctgagagtggttgtgtgcccctgtagtcccagctaccagggaggctgagatggaaggatcccttgagcgttggaggtcaaggctgcagtgagccgagaatgtgccattgctctccagcctgggcaacagaggaagactgtgtctcgaaaaaaaaaaagaaaaataggtaaattgttcatgaccttcttagataagacactaaaaccacaagcaaagtaagaaaaggtaggtaactggactttgccaaaattaaaaacttttgagcatcaaaggacactgtcaagagaatgaaaagagaatctatagaatgggggaaaatatttgtgaatcacagcagataagggtccagcattccgaatatacaaaggactcttacaactcaacaatacaaagacactcaatatcattagtcattaggaaaatgcaaatcaaaaccacagtaagacaccacttcacactctctgaggtggctataatcagaaatatgaaaaatatcaaggttggcaaaaatgtggaaaaatgggaagcctcttccattgttggtagcaacataaaatgttccagccactgcggaaaacagtctggcagttcctcagtaagttaaacatagacagcgatgtgtgagccagcaattccactcctaagtacagacccaaaagagttgaaaacaggtattcaaacaaaaacttgtacatggaatgtttgcaacagcactatttataatatccaaaaggtggaaacaactgacgtccataaatggatggagagagaaatgtggtctatccatacaaaggaatgctattcagccacaaaaaatgaatctagaaaagtgggtgaagaaaccagaaacaaaaggcacaactcgtatgattccatttgtatgatgtgttcagaataggtaaattcagagacacagaaagcatattagtggttgccaggggctggggacggggacaggggaagagactgtttaatgggtgtagtttccttttggggagatgaaatgttttggaactagtcagaggtgatgggtgcactgcattgcgagtgttccatgatgctactgaattgcatattttaaaatgcttaattttatgatatgggaattttacctcaacaaaaattattgaggtagcataatttctctatatcattatctttgagatagagtctcgctctgtcacccaggctggagtgcagtggtgtgatcttggctcaccgcaacctccaccttccaggttcaagcaattcttctgcctcagcctcctgagtagctgggattacaggtgtgcaccaccaggcctggctaatttttgtattttttgtagagacggggtttcaccatgttggccaggctggtcttgaactcctgacctcaagtgatccgcctgcctcggcctcccaaagtgctgggattataggcgtgagcctccgcacccggcctctgtatcattattttccaaaattgttgtagttgttctagttcatctttccattttaattgtgggaactgcttgtctatatcttcagaaaatgtggctgagatttgtactggaattgcatttaatgtataaatcaacatggcaaaaatcagtatctctactgttgagtccaaaacccaggaacacagcatgtctctccgtttgcctgggtcttgatactttcattaacatttcatttttttaaatttctgattctaactgtacattgcaggtagaaatactgtattagtttgtccttgcactgctataaagaactacctaagactgggtaatttataaagaaaagaggtttaattgactcacagttctgcaggctgtacaggaggcctcagggaacttacaatcatggtgaaaggcaaaggggaagcaagcacatcttcacgtggcagcaggaagagagtgaagggggagttgctacacactttcaaaccaccaggtctcgtgagaactctataaccagacagcactcgggaatggtgccaaaccattagaaaccaccaacatgaggccgggcgcagtggctcacgcctgacaccccagcactttgggaggccgaggcgggcggatcacaaggtcaggagtttgagaccagcctggccaatatggtgaaaccccgtctccactaaaaatacaaaaaaaaaaaaaaattagccaggcatggtggcgggcgcctatagtcccagctactcgggaggctgaggcaggagaattgcttgaacccaggacgcggaggttgcagtgagctgaaatcgggccactgcactccagcctgggggacaaagcgagactctgtctcaaaaaaaaaaaaaaaaaagaaagaaagaaaatagaaaccaccctcatgacccaatcacctcccaccaggctccacctccaacactggggatcacaattcaacatgcagttggggactcacagccaaatcatgtcaaatacaatggatttttgcatgttgactttgtatattgccatcttgctaaccccacttattcactgagtttgcttttttgtagattccttgggattttctacatagacaatcatgttgtctgggaatcgggagaggtttatttcttcattttcaatctgtatgcctgtactttgcttctcttgtattttactgactaagacttccaatagatggcttttttgttgttgttattgtttttgttttttgagacagggtctcactgtgtcacccaggctggagtgcagtggcatgatctcggctcactgcaacctccacctcctgggttcaagcaatcctgcctaagtctcctgagtagctgggactactggcacgcaccaccacacctagcatgttttttgtttgtttgtttgttttttagtacagatggggtttcaccaccttggccaggcgggtcttgaactcatgacttccagtgatccacccgccttggcctcccaaagtgctgggattacagttgtgagccaccgcgcccggccggtaaatgttgataataggagtaggagtggatgcgctcgtcctgctctcagtcctgggaaaaggattctctcacctcagtacagcactggctgtaaatacttcatcagagctctttcttagattgaagttgttttctgttcctgctttgccgagatgttcaccgtgaacgcacactaaatgttgtccaatgctcgctcactgtccatcgcttgatgtaaggggcttacaactgcaggttggtgcatttttacaaatcccagcacctgtgccatctcagtgttagcatttgctgactgtttttttccatttatttgttttttcggggtttttttgagatggagttcactcttgttgcccaggctggagtgcaatggcgcaatctcagctcactgcaacctccacctccaggtttcaagcaattctcccgcctcagcctcctgagtagttgggattacaggcatgcaccaccacgcctggctaattttgtattattattattattttttttggagatggagtcttgctctgtcgcccaggctggaatggtgtgatctcagctcactgcaacctccacctcccaggttcaagagattctcctgcctcagcctcccaagtagctgggattacaggtgcccgacaccatgcccggctaatttttgtatttttagtagagatgggattttgccatattggtcaggctggtctcaaactcctgacttcaggtgatctgcctgcctcagcctcccaaagtgctgggattacaggcatgagccaccatgcccagcaactgagattttcctggttcacttatgccaagtaattttggattttatcctaaagtgtagggttttattcttttttttttttttttttttgaggcggagtctcgctctgtcacccaggctggagtgcagtggcgcgatcttggctcaccgcaagctccacctcctgggttcacaccattctcctgcctcagcctcccaggtagctgggactacaggcgcccgccaccacgcccggctaatttttttgtaattttttagtggagatgggttttcaccatgttagccaggatggtctcgatctcctgacctcgtgatccgcccacctcggcctctcaaagtgctgggattacaggcgtgagccaccgtgcccggcctcgttttccatttaagttgagattttcctggttcagttatgccaagtaattttggattttatcctaagtccagggttttattctttttagagatggggtctctctctgtcacccaggctggagagcaggtgccatcgtaattcactgcagcttccagctcctgggctccagtgaccctcctgcctcagcttcctgagtggctgggaccacagcgcgtggctctttgatgaataaacactccttggtttgctgtttgcctttggttaaattccaaagcactgacatggttgtttctgacttttgtttagatttacaggtacattttggagagagggtttgttgacctcctcacccctccactctggaaatctttaatatattttattatgcaattcaaccttccatccaatatacatactggacgcctgcctcctgcatggctggctctgcctcagccactgggacccagggtgaacagatacaccaccttctcccacagtgcttgtgtaaccaccaagccaatgtcctgagttacttccaacagtgaaaggtacagggattaataaggaactttcgctgagcacctgccccgtgccagatactggtccaagcacctgcaggaagcatcttaccctcaaggtggccacaggagttagctatgcccgtctcacgcgcagggacactgaggaacaggcagccttggctgctgccccccggacttcacctgccacatcaggtgccgccggcatagcaggccttcatcaaatattagtcagcacttctgttttcttctgcaggtggtgacaccatctaagaggcactggccagagagctgggcagcagctgccacctgggatgaagatgggcagagctgggccaccagggccgtggtgtgaacacaccactctccctccaggggccgaccaacgagctccgggggtccaaccctggctccggctttggcagaactctcacctcgcccccagacacctgtgggaggagcacagtgcaggtggcgacagctcccaggggccgagcaaggctgtgagcctccgcactaggggcctctcccatctagtcctccccacacgctggggttaacgcattcttaacatatgtatgttaacccaaccataacaaggtgccaccatcgtcccgtccacaagggaggagacagtggctacagggtggcaggcagcccttacaagtgggactggaagcctttccctcccgccctgtgggaagcctgtggccgtccccgccctcgtccagctgtgccctgtcctctccagctgaccgtccccgtcaatctcatccctgccaatgatcacatcctagcagcaaccgggcctgaaccggcctgctatagcttgcgcacaatgcatcttccgtccgcttagcttttctgcccccatttcctacagccggggaggctcgggtgcagtgtctctcctcgctcctgcttcctgacccagagcccagacctgggacttcccaaaagcccccagacacaccaagggcaccgccgaacccctcagagccaagggagaggagagctagcgttccctgagctcaccttgcctggtggcacgggtcccctctgtctgcggccactgtcatgggagaagccaggctcagccactggcaagagcaggcagccagcaagaggtggatgtgggtccaagcccaggccacacggctcccagcaagagccatggccaggggccagtcggcagcccctctgcccgacaaggatgtgggccagcgtcgtctgcacttcagaggagacgagaaccaggaggcggcccccgagggcatcccgcgggtcctcacggaggctgcgttctcccaccttggccaggatgccccgggaacaccatgcagcgtctctgaggcttcctgtgcagaggggctcacagagcccccaccggcctggtttagtaaatgcagtttttaccttttcactttaaaggaaaatgaaaattcctcctttcagacgctctgtgactgatgttgaccggtgttgactggtgaggttgagaatgaggtgagctgggtcaggccagcctagagggaagcgggtgacctggaaggccgtgctgtcaggcgtggtcggcagtcggccccacggctccttcagggtgggcctggaccacagacacctcaccagggtctcccgtccctgggcggctgcatatgggtccaagcaagccacaaaggctgtgccagccaagcccaacgcaggccgcccctacagtccctgcccggccctgcaccctccccaccccttcccaggtgctgatcaccagtactcactctgcaccccaaaccccaaaccccgtctcagcgtctgcccctgaggaccctctgagtgtcaacccaactgacccgtctgcctcatcagtgacccctcggggctgcacacctctcccatcgcaggtcctggcactgctctccggcaccgagctccccctcccaggtggggctcaggcggttccctgccctccgtccttagacctcagctgaaacctgagctctccccaccacccgcccccgccagcctctgcactgctccccacgggaaggccgttctcccttggtttaccgttccctgcgcttggctcggccatgtgcacatagtaggtgcttaccacactcgtgcaatgaacacacagagcggtgcagggcccaggacagcgccttccccacgtgctcagggggcacaagggcgtccctccaagtcttgctcaggggcctcccagggtccctgcccagctgtgggtcctcactgagcacccggcgaggacagagtacggcatccgttggcctcgatctccggaacaacacgggcacacggccgtcccagccagcaacgagagccacgaaacaaatccacccgggctgactcccgaagccctcggactgttccgccccacggacctcccggaccctctcttccacggggaagacaccgcccagccaggaccgggtgtataaagaaacgggatttccgtaggggcaggccgatttcccctgcggggccgagggaggtgtggggaggattctgcgctggggggaggaggagagggaggacgcctttctgcctgggaagggaaaacgcgccccctcctgattggcatggcgggccgtcccccgggccccagggccctgccgggaacgctctgggctccccaaacatggggtctccgagcagtggggcccagcctctgcctccggcgactggagactcacctcacccgcccaaatccgccccgctctccgactgggccccgcctcccactgccccgccatccgcccaccctttcaccgccccctgcgggcagcaggcgcgtcctggggctgggcaaccggggtgcaggttccggagctgccagagctgtgagggggactcgggagagatccaggttcctctggctgcgaagtccctggaggccgggccggagggctccgcgcacgtagcactttttggcccgcccggcgcccccgtcgcctccacaagggctgaagaggacgggcgggctggaccaggcggggctccgagacgcgtccgagacgggggcctgggcccgggagaggggcgggggctgggctcccggacccgggcgcggggccttttaacccctgcagacccaggaccggccgggccgccccaagacgaacgccgcagggctgggctcagcccaagccagacggcgagagtcgcaccgaggtggaagctgggggcgcggcctcgccggggccaggaaaggggcggggccgggtggggcccggggaggagcctgtgcgccccgccctccgtgacgcgccgcggcccccgcgcatataagtgggcgcgtccgcgcgtgcgcaccccgcgcgcgcctctctgtcgtggcgcggcttcccgcggtcttctctgcaaatgggctccgtggcctagcgcccccgtccccgccacccgtgatcgtgcgccgaggcccgcgaggggtcgccgcccaggtgaggggcgccgcgcgcgggtgggacgagcaggcccgaggggcggggggcgaggggcggggctgggccgggggctcctctcctctccgcctggcgagcgctgggctcggggtccccggcgggctcctctcgggtcgggcgggttgggacggcgcccaccaggttcccgacgtctgggccggggccccgcgcacaaagcgcctttgttccacccgctcggccggtttgggctggttggagccgcccgcgccccgcgcggcgaaggcggtgccgggagctggggagccccgcctcggtaaataacccagcgcggcggctccacccgctggggagcgcccttcatgacggaaggccgctgacccgaggggctcctccacccccatgcgcagatcccaccagccagcaagctaaagcatggcggccatcccctccagcggctcgctcgtggccacccacgactactaccggcgtgagtagcccctgccccccatccacgcggatgctctgctggcgccagtgccggccccgtgcaggctgcggaaccagcgctcggcctgaaggccggtgggctggggggctccgcgccccgcgttgctgacgggacctctcctctccaggccgcctgggttccacttccagcaacagctcctgcagcagtaccgagtgccccggggaagccattccccaccccccaggtgagtgcaggatcgcccctttctccccccgctcctccaggagctggcagcatcaagaccccacttcgcttctctcaggtctccccaaggctgacccgggtcattggtgggccagcttctttttcgggaagtccaccctcccgttcatggccacggtgttggagtccgcagagcactcggaacctccccaggcctccagcagcatgaccgcctgtggcctggctcgggacgccccgaggaagcagcccggcggtcagtccagcacagccagcgctgggcccccgtcctgacctgagcggttaccaccagccccaggcctgcggaggcgctagtccaccagagcccctccccgcccctctccccactccgcatccctcgcccccctccccacctcccaccccccaccctgtaaactaggcggctgcagcaagcagaccttcgcatcaacacagcagacaccaaaaaccagtgagagccccgctctctaccgcccggccccagcactcgctagctttcctgacacctggaactgtgcacctggcaccaagcggaaaataaactccaagcagccagtagccccgatggtgtgtgcctgagctgtgtggcccgaggttccatttgagtgtgagaaatggctgaatccctcccgacctcactgccttgtgggggctggccctgctcccaggcctttctgggcctcctcacgctgtgaggctgttgctggggctgataagggtggggttcactgctgcttctggagagccttggacagcaggcagtcctggagctggacaagcaggacccagggcagccactgaggtgggcccccgtgccacctttagcggggggaaagggagcagggagggctggtcctctgagggattcaggccccttacccgagggcctgcggggcggggagtagcctctggctgtgagctgggaagccctcactctggagggacctggttcctgctggtaggtgtctcccaagggcctcccataggggtgttgccccaagacaggctgaggggtaggggctgcaggcaccgtggaggggtcttcctgccacaggcagcccagcttaaagtgagggtggctgcatcattctggcctggtataggcatggagtgttggagtccgggagtgctgcaggctggcagggatgggggtccacacacaggagtgcatgggctgtgagcttagtagactccttcataaccaaggtgggtggtgtccccacacctctgccaggagcctacagggattgactcagttctgttgagaggcagcttagtgagcaggtgggagtcagtgagatagctggagacttgatgtgtggccagggacatggtgagaggaggggcctccgtggggtgggaaagggtggggttcagtggtgggggagggactctggggaggggtggggatcagtgggtgctccctgcctggtaccctgttccactgcactataaatagctgtactagttggtgggaagctggtgggaaggcatctggcttgtggcctctgatggctgagcctttgtcctgtccacagggtggaggcagcctcacccagccatccaagccggtggtcagtgctgaggctgggtgggggagcctccgatggacccaggagtgggaggctgctcctaatggcagttgagccccctgcagccttttgcagtgtccagatgaagcccacagagaccctcctccatgtacacacagctgtgagggtagcaggagttggtgttgaagggagagcccagccacgctcaggtccccaccacacatggcctgggggggctccgcccttggctgagctggagggcttggggtcaggaccaagggtgggtccaccctgcttggaaagaagctgtcctggcttttggagtcagcgggggaggggcactgcccgggagctggtgtcttgttggaaggggcagctgggagtagggagcagccgagccacaggctgcccgcggcatcgtcccctgcctcgggtcagggggccccttgactggaggacctcacaaccctgggggtgtccatggcctgttcctgggagctgcaccctcatcagattctctgtagggggagaagtcatatcttttcctcacccatcacaagcttcatggctgagacctgttagaaacaaaatgcttcctcggtgccacaaagaaatagcactcaaacattaattttctcagcaaggcaatttttacttctatagaagggtgcgactcgcggatggagcaatggtgagagcgcacctggacaagggaggggaaggggttcttattcctgacacaggtagcctctacggctgtgtcattcccctgttgggtggggttggactgcacactctaaggtaattctgattgactattttaaagagagcaggggtgtgacccagagtggtggggtgagtagtttggcaggaaggacaggaacaggtagctaaagatgacttaggtcagagcaggtgaccaggggccgggtgcgatggctcacgcctgtaatcccagcactttgggaggccgaggcgggtggatcatgaggtcaggagatcgagaccatcttggcaaacgtggtgaaaccccgtctctactaaaaatacaaaaaaaattagccaggcgtggtggcgggcacctgtagtcccagctactcgggaggctgaggcaggagaatggcaggaacccggggggcggagcttgcagtgagcggacatcgcaccactgcactccagcctgggcaacagagcgagactccatctcaaaaaaaaaaaaaaaaaaaaacaggtaccaggatgagtcaggacggagcaggtgaccaggggaacagatgtgaactattgattaaaactggtggaaaaggttgtttactgaaactatgcacgagttaaatggagaacaaagaactgaacatacatgctgagtcctctaagagaaatctagaactcactgtatccaacagacccttgaacaaaagacagattaaactgggcgcagtggctcacgcctatattcccaacactttgggaggctgaggcaggtggatcactagaagccgggacttcaagtccagcttggtcaacatggcaaccaacacggcaaaaccctgtttctatcaaaaacaaaaaaattagccagacgtggcggtgcatgcctggagtcccagctactggggaggctgagatgggaggatcccctgagcccgggaggcggaggctgcggtgagccaagattgcgctactgcactccagcctgggcgtcagagagcaagactctgtcttaaaaaaaaaaaagaaaaagcatacaaacatttaatgcgagttccatgtgatgtgggccccttcaaaacaaagaccaaagaaatggtctatttcacagcggagcaggagtgagcggaggatggaagggtgtgatcaaggcccgacttgactctgacatccctttcctctggttagggggcgggacaccacgtgagggtctgcagggagagggtctgggagtggccttcctgggttttatggcctgcttcagggaagaaaggcagggaggttagaatggcctcaacggtgaaatatttatctttttcttcctccctaatcccagaattcagaaactgttagtgggtttgcataagttcaatgagaatctgttcttgtaatagggcacaattgaaaacattggttatattaccaaggctttgactggaatgtcctattttcagatacgactaaaggagttagggttgactgcatggtccaataaagccccttggaaaaaagctggcctggtacctcacatacgtggttcccttacagatgagtaaagaatgtcaattcctggcaggtcccagaatcttaagataccttagggacctcaagaagagaggaattcccctaaatctgtacttattgcaggcaaagtctgatggcaagtctttgcgatggcttcctagcctcaagaggcttttaaaagcccaatctcagattccttataaaaagttccagtaggccaggcacagtggctcacacctgtaatcccagcactttgggaggccacggtgggcagatcacgaggtcaggggatcgagaccatcctggctaacacggtgaaaccccgtctctactaaaaataaaaaaattagccgggcatggtggcgggtgcctgtagtcccagctatgcgggaggctgaggcagaagaatggcatgaacccgggagacggagcttgcagtgagccgagatcgcgccactgcactccagcctgggcgacagagcaagactccgtctcaggaaaaaaaaaaaaaaaagttccagtaaagcaaattttaaaagagcccacgtgtccaggtgtacctataatcccagcactttgggagcctgagatgggaggtttgcttgagcccaggagttcaggactggcctgggcaacatagtggggctccctctctactaaaatacaaataaattagccaggtgtggtgtcacatgcctgtcgtcccagctactctggagggtggggctggaaggtggcttgagcccaggaggtcaaggcagcagtgaaccatgatggtaccactgcactccagcctcggtgacagggtgaggccctgttggaaaacaaaaatgaggaagaacctatgtggttaatcactattcttgttccacttacataaataaccacaccaggtttaatgaggccaaacttactctgcaatcaaatcaatcttttattatctttgatagaaatgtgttaatttgaaaacaatcctacttttattatctttgatagaaatgcgttaatttgcagccggtcacggtggctcacacctgtaatcccagcactttgggaagccgaggtgggcggatcacctgaggtcaggagttcgagaccagcctggccaacatggcaaaaccctatctctactaaaaatacaaaaattagtcgggcgtggtagcaggcacctgtaatcccagagacttgggaggctgaggcaggagaatcacttgaacccgagaggcagaggttgcagtgagccaatattgcgccattgcactccagcctgggcgacagagcgagactccatctcaaaaaaaaaaaggaagaaggaaatttgttggctgggtgcggtggctcacacctgtaatcccagcattttgggaggccgaggtgggtggatcacctgaggtcgggagttcgagaccaacctgaccaacgtgaagaaaccccatctctactgaaagtacaaaaattagctgggcgtggtggcgcatgcctgtaatcccagctactcgggaggctgaggcaggagaatcacttgaacccgggaggcagaggttgccgtgagccgagatcaagccattgcactccagcctgtgcaataagagcgaaactctatctcaaaaaaaaaaaaagaaaaagaaatttgttgactgtagagagaaaaattatgtttcaaaataaaactcgtgcccccactattagactctagcccggtttgctgtctggaggttttgtcgcccacctgtggtccggaccgggtcctgaacttcagtttcctccaatatttgcctacagctcaccaaaccactctttccaattttttcttccaccattcctcatggagtcactgaaaattaaaactgctcttttcccaaagccctgtaagctgaagctgccccacttgatacagacttcagagaaatttccccagcaactctcgtacagacggctttcgtgcccaggctgggcgcagcagctcaggcctgtagtcccgaggcaggaggattgctagagcccaggagttcgagaccagcctgggcaacatagcaagaccctgaatctcctaaaaaaaaaaaaatttaaaattagccaggtgtggtggtgcattcctgtagtcccaactattcaggaggctgaggcgggaggatcacttgagcctgggaattcaaggctgcaatgagctgtggtcacgccactgcgctccagcctgggtgacagagcaagaccctgtcttcaaaaacaaaaacagaaacaaaaaacgttttcttacatctggaaaacaaaatattaaagaaccgtaatgcttcagacaaaagtcattaaacagtaaacatcctcgtcagttcattcattcccatgtcattaattcttgttctggttgatcctgggacagaactttcatggacctgccaggtccctccttcgagttctggaaatttgcacccaatccaaggctatgacctgaaccagaaacctgtgctccagagcacctgtcagaatccttcccaggaatctctttgaagaataaacaatttgggactagctgattgcaaagctttcagaaaaaatcaaagtaagataataactgtgaatgaccgaagacttaagatagccatggctcaggatctgatgagagtttattatattcgtgacacggttggcaaggaaacttggttatttctgtggcatgcagcattttaatgtaataaccaaaattatgactgataacattgcaccagatttctaggaatagcatgtgagataggatatatatcataggataacgtatcagatttctaggaattttatagagtttctgcaacattcatatcaaaaccaaacccgtaaatagaacctccagaagacttagtgtgacttactatttcacacgctttccatctcatgtagcacatcggataagcctgattagtctgacatctgtctttcacaaggcagaagacaaatccttttgagaaatcctagtacctttccagaaactcccaaaattatttttctttctttcttttttttttttttttttttgagatggagtctcgctctgtcgcccaggctggagtgcagtggcgcgatctcggctcactgcaagctccacctcccgggttcacaccagtctgctgcctcagcctcccacgtagctgggactacaggcgcccacccccaccaccacacccagctaattttttgtattttttagtagagacggggtttcaccgtgttagccaggatggtgtcgatctcctgacctcgtgatccacctgcctcagcctcccaaagtgctgggattacaggcatgagccaccgtgccccgcctattcttcttttaaaccaaaaaaactttcaggtgagtcaaaaccaaaaccaataagctttttatgacttaaccatggatgaaagagacaccttcaaaatcaggtgcaaaggaggcagcccccccagcccggaaccaccccacagacagtagagaagggcccttgtcagcgcaggagtgaggggcgctttccagcactgacccagcgacaaaggtgaaggtgggaaaagccccttgtggacgtggacggtgaaactgagctggcgcctcgggcagtgatgcttgggctggcagagaccagggagagagttctcactggtcataaggccaagctctcaagacacaagacaaacaggaaagaaacacctgcccctgggaggaaagaacccttgagcaccaaaaccaaatttacatgagcgtcccgagccacgcgaatgactttctcccaccaagctgaactgggaagagcaggaacaaggcgtgtttgcctcccaccctcagccgggcactgcagacagacagccagagagcgggctgtggtcagagtcccctctgacctctgctggcttcgtgtcagtctcccggatctcatctgcaggctccagagcaggctgcgtgtcagcagctgagacccaaggcacacacgatggagtaaggagaggagcacacgcgtgtattggacgcagacactccacatttgtgaacctttcctgcacccatcacctcagtaaaccccagggaagcgcgtgggccttgatcccaggtccaggccctctgcccaggcccctcctcagcagggcccggccatgcccgctccacagcagctcaggtcgggttctcgtagctggtgaagctggagagcctctcccgcagggccttgaagcagggtctctgctcggggtccctgcaccagcatgtcagcatcagcttgtgcacgctgggcgggcactccagagggcagggcatgcggtagccggcgtccaccctcaggaaggcctcatggttggacatgcctgcggccgacagggatgagaagagctggggcccacctgcctaccctcccccaagaagccacaccagccatccactgccccttcctggggccttccccgcagcctcagctgccatgccttggcgccacccagcacactgtccactgctaacacctccctctggacagggctccaacaggcagctccaggcaccagcctgggtgctcagagaatggtgcaggtgtggagttcaggcgatggcccgcggagggccctgaagcccgtgggggaggcaccccccagcgtccctgccggctacccaggacctcccccactctgcctctcatgcccagtcagggacagtggggacagtacctgggtagggcacctgacccctgctgaacatctcatgcaggagaatcccaaaggaccagacgtcggatttggtggagtaatggcctcgggagagcgcttcaggggccgtccacttgtaggggatattgtggtcatgggagaggtagacgtcctcctgcaatcagcctggagctgagtgggccgtgggggctgcctgtgccctgcccccgaagcatggacgggcacagcggccgcattgccccagcagtgggacggtgatgaccccactgtctgacccacgcacggccgctgcagctaaggccacactggggcctgaccaccttcaggagcccaacttcccctgggattgcaggtgtgtggggaccggagggcccgggggacagggaactgggaggctcccaggccgtcagaggggcccagggctgggccagtgaacaaggcacgtgaacaaggcagcggctgcgtggtgggccctgctgtgcgtgccattcagaatgggggccccaccggactcacggtggcttcccacctccctgcccagcctgggctcccgagggcaggggccgcatcctgctcccagccgagtccccagctccacacacaggaagcccccagccctccggccacgccccggccacgaccccagccacgccctctgagggccctaccttgataagcctggctaacccgaagtccccaactttgcagagggtgttttccccgacgaggatgttcctggcggccaggtcccggtggatgtaattctgcgactccaggtaacacatgccctcagccacctgccaggcgatgtccagcagctccgaaacgggcaggactttctcatcagagtctgcagaggggagtggagcagagcctggggtcagctgagccagctgaggtggggaagggttggggaggctgggccatgtctcatctgcctccaagctctgcgggctcagaggaggggccggggcaaagggcagctggcctgattgaaaattggaactgcaggccagctaccgcccttctggaaggcaactgtttatcacgaaccaaggagcaagctgggcgtggtggctcacgcctgtaatcccagcactttgagaggctgaggcggatggatcacgaggtcaggagatcgagaccatcctggctaacacggtgaaaccccatctctactaaaaatacaaaaaattagccgggcgtggtggcgggcgcctgtagtcccagctactcgggaggctgaggcaggagaatggcgtgaacccgggaggcggagcttgcagtgagccgagatcacgccactgcactccagcctgggcgacagagccagactccgtctcaaaaaaaaaaaaaaaaaatatatatatatatatatatatatataattagctgggcgtggtgacaggtgcctgtaatctcagctactcaggtggctgaggcaggagaatcatttgaacccaggaggtggaggttacagtgagccgagactgcgccattgcactccagcctgggcgacagagtgagactccgtctcaaaaaaaaaaaaaagaaccaaggagcagttcctagtggtctagcccagcgatttcccttctggaagtttgtgatgacgcgggaggagctggacgcagaaggaccagcgaagaggctcatgactgcgtgatgtaggcagtgggaactcgaacaggagaatggctgtcagcggcttgcggcctggtggtgcctgttttaccccacattccctcccggaggaccctgaagggcgtggggactgtctgagatgatcaagccctttgtgtgagggcgaggggtacggagcctttcgctcagagcgcaaacgtgcgtggtgcctcagtgtagctctcctcagacacacacggcatttttcctataccacaacgttccctcccattctaacatcggaatccaaactgcgccttcacgcacgggcatctccattccctggcagcgattgtctttggttttggtgagaaaggaaataatggaacttagagaggatgaagtctttgagccaatgtgatctgtgtgtgtctgtgtgtgtgtctggatcagtgtgtgtctgtgtgtgtgtgtgtctgtgtgtgtccgtgtgatctgtgtgtgtgtctgtgtgtgtccgtgtgatctgttttgtgtgtctctgtgtgtgtgtctgtgtctatgtgtatgtctgtgtgtgtcatgtgatgtgtcttgtgtgtgtgtctgtgtgtgcatgtgtatgtctgtgtgcatgtgtgtgtgcatgtgtgtctgtgcgtgtgtgtctctgtgtgtctgtgtctgtgtctgtgtgtgcatgtgtgtgtctgtgtgtctgtgtgtctacgtgtgtgtgtgtgtagacgtggggggggggtgtgcactttatttcctcacgtgcccccgctgcctccagcaagagccccggcccatgccactcaccgcggagcagctccagcaggctgcccttggccatgagctccgtgatgatgtacacggggtcccccacggacaccacggcgtacagcgccaggatgtgtttgtgccgcagcttcttcatggcctggatctccgactgcagcatctgctggtgcaggaggttgtctgcggggacgggtggcctcggtggatgcagcccctgaccccccaggccccaaggaagaggccaaggccctgcccccacacacagcagccatcacacccagcagctgtgcaggacacacagacctcctgcccccgacagggcacctggctcccgaggccacgaaatggcagatgcagccggccccacagggccccagcctggcgtacccacggggctgtggtggccacccgatttcttcctgtgcccggcccagacctctgacatagaggccagacctctgctggggcccagacgggttccagggaagttttacccatttccagtgatctattttaatggctttccattacgtcaaggattttaaattttctttctttctttcttttttttttttcccaagacggggtcttgctctgtcgcccaggctggagtgcaatggcgcgatctcagctcactgcaatctccgcctcctgggttgaagcgattctcctgcctcagcctcccgagtagctgggactacaggcacatgcctccacactcggctaatttttgtatttttagtagagacgtggtttccccatgttggccaggctggtctcaaactcctgacctcgtgatccgcccaccttggcttcccaaagtgtggggattacagatgtgagccaccgtgcccggcctaaaattttcttttataataaatgtatttaggtaaaaacataggtgcaattgaaagggaaccactctcgcatggacgctgtgggtgctgcttggggctcgaggccagaggtccctgttggcggggtgggagggtggcccagggcaggcacggggccacacagagccctgatcggggcccactcacctcgagaaatcaccttaatggccacctggacccggtctttccagagcccctcgaagacctccccaaagtagccggaccccagcttcctgcagagcgtgaactcctccctcggcctctcccagtcatcccaatggggcaggggctcaggctcgtgctggaggaagagtcggggacacagggcaggggctcatccttcaggaagtgccagtctgaagccagcacagggagcctggatttagcctcagatttagggccacgatcagcctgggttgggggtttctgagtgtctgacacaagggtggactctcctgggggctgcccccagcccagcatgaaacacccagacagaccggagccaggaccctgcagagtgccgctggcctctccgagagtggccaggcccggggatggtctcctggccccacccccaactcaggcaaacacctgtgctctgcagaaccatgggcttccctccagtgggccccaggtcagtgagtcaggacccctcccatgctgcccggccaacctctcccagtaggaaatgccagcctgtgaccccccagcctgaccccgcgtgaccaagtcagggcggagcggctaccttccggcagggcgcggccagccgcaggccgtgggacaggctctgggccctgtggtagttcacaagctcgggcaggctgaggaaggacaccgcctcgttcaggtgcagccggcccccggcacgccgccagatcttgtagtgccgcacagcctgcgtgtcccgcactgggagggagagcgtgagctgtgtggccaccccaactccgacgcctccctgcgtccccagccctgctggccacacctgcgcagagtttctgggtccccacagttgctgttggtgcttcctcagtaccacccctgcctcccctccctcagaacggctccctcctgccctgcacgctctggccaagctctctggcccctcctgcccccgtgccaggcagccagtggcctccgcctggatggcagctgcctaaaatcccagccatgctgagatcctcaggggcagggatggggtttctctgcgccccgcacaccccaggctcaggtctcatgctgggcgaggttcccatgggtgctgaggacctcccacgagtgcctcgggcagggctggctggagaagcccctgccctcccagggaggggccctgccccacgactaccctagcagccagtgacccaggccccagggaggagcgggccaggtgggcggaggggatgggagctccctggagaggagcccatgtcccccgtctcagccagagcgagccgggttcaccacgtggctgggagggcttagagccaggagcccccgcaggcaagcacaggctcggaggccggggccgcacccgacaggacgtagtcggcactcggcttctcgctgaccctgatcaggaaggcgcccgtggcgttgccctcggcctgcagccgacgcacagcttccgagcgggagatgcagccaaagaaccacctgcaggggaggagtctgagaacacgcggacctgggcccaccccacgtggaccccacgctggccccagcctgcccgcctggaaccccagccgcccttgcctgccacctcaagctcccagccctgaccacagctgctctcaggagctgtcgctgacccagacgccctgaatgtcccgaaaggccaggacaggcccctgaggacccggcgggggcaggggcaggcgctaccacaccctgccctgagtggcccgagtctaggggtcagagcctagggtggagctggggagggcagctgagcaggatggctgcccagagctgcctgcacacacccatgtgtgacgcacgctcacacacacacagtcacaaacccccacacatgcgcacagttcacccgcacacctgaacacacacgcgcatgtgtgctcacttgcccacacgctcacacgcacgcacacacagccactcgcgcgcactaactcccggctgcggggtgtgggccagccctggactgtggacttccaggtggagcttgcagaagctccaggtgacctgcgccctttgtgtgtctgactccctcaggtcactggaacacaaaccccacacagaagaccacggcccagcatggagcccctggggtccaccccctccacttccgcacacctggaagcactgccccacctgcccctccaaccacctggcctcccgccccccccctcacctggcctcccgccccctcctcacctggcctcccgccccctcctcacctggcctcccgccccccccctcacctggcctcccgccccctcctcacctggcctcccgccccctcctcacctggcctcccgcccccccctcacctggcctcccaccccgtcctcacctggcctcccgcacccccctcacctggcctcccgcccccccctcacctggcctcccgccccctcctcacctggcctcccgccccctcctctcctggcctcccgccccctcctctcctggcctcccgtcccctcctctcctggtctcccgccccccccacctggcctcccgccccccctcacctggcctccagccccccccacctagcctcccgctcccccccccacctggcctcccaccccctcctcacctggcctcctccccacttctcacctgggcgagttctcaggactcagggtctttgcacctgggagctgaccagcctccggccagaccccacccctgcacccctgctcactaacgaggtcgtgggtctgcgcgtgaccctgctaacgaggtcgtgggtctgcacgtaatagaggggtctccaccatgggcccctgcccgacggcctctttacagcctcccctgcttgttgcttgggtcccccgggagctaaccctacacagcctgtgactcacgcacacacacagtgggtgcccaatcactgatgagaaacgcgggatctcaggagcgtgaccctcctcagcctgagctccgggcagctgtggaagccagggccaggccacaccagctgctgtctggttccccgcagggcacagcaggcaggaagtttgcccggcagccggcccgctcccctaactaggtcgtgtgtctggttccggcactttggaaactgggcaagcttcaagcttcgtttcccccaaaggccctggaacgctccgacagaccttgtcactggccaccgggccccagaagtccaccctggaccctctgtcctccctgggtcccggcaatgcagcgtccacccccgagctgtgacaaggatgagcccaaggcaggggccgtgccctctgacccccgtgctccaactcccgcagggacagtcctgggcactcctgggcgccagcgcatggggcctgcagggaggatcaagcgggatgcccagcctggactttggggtgcaggaagatggaaccggggtccccaccttcttgggcctccctgagcagcccagagccctgtccctcccctgtgcctagagggtggcctgtgccaaagctcccagcagcctaggacacgcacggttccgactccaccgtctccctctcggccaggtagttgtggggcacatagccctgggccacggccccacccgcctcgtccagcagcgtggcccaccaccactgctcctccttcctggccacgtggaagacgtcccccgcgcggaagctcagctcctcgtccgtccgggacttgaagtcccagaggcccacatacttggggcccaggtgagcctggtcccgggacaccatggcgggcgggcgcagcggcaggaccaggctgtggcccagctggagcacccagagctgggcgtggcaggcgggccgtcccacttcctcatgacaggccgggaagcagccacacccagcacccacaggcgctccagagcaccccggctcctcctgagggcccagccggccccacaagtcctcaggcccactggggcccatctgagcacttagcgcccgcactatgggaacccactgggcaagcaccgccagggccggcctgagcgcaggagagggggaggaggacctcccggttggggcttcttgggggtccaacttatggacactcaggcactcagggaagccaacggccctctgggaacaagcctcgcagcctgagggcaggaaggtgagggctgcaggcgctgccttcccaaccctcagagctgcgggggcacaggtgggggccgcctctctccccgcttccggcagcttcccctccacccgtcggtgccctcacccagccccagactccacccctgagcacagggcccaatgtcaggagctgctgtgggcaggcgtcctgagagcggcctcatgggcaggcccgccctcgggtaagggccaagcagggaagagggagtggaatcagggcagcgacagctgtgtgggtcggcccggaggacttcccggaagaggagggcccgagggttttgggggatccccggggaggcagagccaggggcacccacggctgaagaaacgggcactgccttcctccacacggacgccagggggcaggcaaggaccgtgagtgcggcctggaagcgcccatggcgctggggcccaaggccacaggtccctcccaggcagcccctcccgcctccagcctctgcctcctcctgtccagcccgcaggacccctgcccccttccagctggcctcccttctcccgactcatgcctgagtgagccctgccgtgacccccacctgcacccgacggccgcctgccccccagcccctgagactcgggacaccccctccctggaggcccctccccgccccaccctcccactgaccctactgtgtccacccgggagctccaacccagggacctggactggcagccacaagggggcaggaaggggcgggaagggaaattcaaagtctgcaaggggtggtaaggaaagtccctaaactgcgtatttcaacttttatttttattgcaaagagaaataatggcaccttccactcattgttttgagattaagaacaataatctggattatttaacaggctcatagatttctgggcagcccagctcagcgctgaccaaggtggggaggggcagcggggtgccggcctgggcagtgtccctcaggccctcccagctctgtctggggtcggttggggaggatgcagggggaggggtggggggtggggaatgcggaaggagggtgccggggcacctggccgggcagcgtccctcagagcccggccagactctgggcccgtgagtctatgtccaggaagcctcgagtatccctgagttcggacgtgcaggactttcagtctaagccacaccaggaggcaggaacgtccccagcccctcccagatacccaggagcaccaaacctgttcagctggtggctggcgagatgcctaggagggcacaggtgccacagacacacctggtccccttaatcccagtggcggctgcagagagcacagagggcgaggccttctgtgccagaggagcccccaggctgctgtgctggggacctgccagaactggaagctcagctcaaggcctcagtgggcccaggtaccagaaccagcccctcccctaggttctcccatgcagatggagctgggcaggtggccagggtcccaaaggctcagataaagcctcttgcctccaccatctgcaggggtcctggttcctgctgcttccctccgcttggccttgttcctccgatgcacgggccccaggaagcccccgcgctgcctccgttctcggagcctccgagtggcctcttccttccccggggccacctgtctctgcacacgggagtctcatctcttagctccctcctgagccaggctttggccggggcctgtggacggcagccatcagcacttcggctcagcaggtacagagctgaccccaactctaggggacaaggactcagtcaggcctgaacttgtctccaaactttctgtccccgaaagccttctgggcacagctgccaacctgggctcccaggagggtggggggcagggtctccgggggccacaaacagaccccaccggcccccttgcttcttgacgtgtttcacgaagacctgagcagaagcttccctgagccagacgtggggagacgagggcggaccctgcacatccctgccccctcctgccttggtgacccccgaggactcacacccagaggcttcctgagccacttgctgcccagcataccatggcatctacctccgagcccccaaccgaccctgcctgaccctgcacaggcagaagactccaaatcccccacggcccaccctgaggcccctggaaatagcctccaagggcagctcccaggtcaccaagcctcccggcccacccttcctgtgccacctggaacccacccagggagatggaatcggcagctcctgccaatgcccttggggctcacgctctctgggcaccatgatgtcctgggctgggggtccgggcggcatgggggccgctccaacctgcattttctagccacgtggacccgtacgctccagctcctgggtctgggtttggggggctgagcctgtgtgtgatgtgcgcctgtgtgcgtgtctgagtgggtcagtcccggcttactgagtgctgtgtgcgtgagtgggtttgtgcacaggccgccagtgtgtctgtgaggggcaggtgacggtgccaccccgtgcctacataccacacatccagtggggtcaacaccacggtctgcctgggagtcagcactggtcatttccacaaacccaagctgggactagggagagaactgggcctttggctcttcaccctgggagggagtccaggggacccaggcaggagacacacagggctcagggttcctcacccagagcctccgaggcttctacccaccctcctgtgccgttgtctctcttgagaggccagggacacgtgtcacactgcacggggaacgtcagccccagccctccgtctgcacgagtcacactgcacggggaacgtcagccccagcccttcgtctgcacgagtcacactgcatgggggacgtcagccccagccctccgtctgcacgagtcacactgcacgggggacgtcagccccagccctccgtctgcacgtctgcctggtgcacgaacatgtgtgcacgccagggcctgaggcccacagccagaggctcctcggtccggcagaccggcatcccttcgagttggcgctctgcagggaggaggggctggcctggctggagcccagagcgttgggtcacgtgaggactcaggggtggcatctgtggatggcgtgcagcttctcccgcagcgtggcgaaggagggccgttcctcggggctgctcctccagcactccagcatgagcacgtagacctccgccgggcaggcagccgggcgcggcagccggtaccctcgcatgatctgctgcagcgtctcgtggttggtcatccctgggaggcgcggggcaagagctgcctcgattctgcctgggggtccctatggaggaggcctcctgtagccccccatgtcatctgcctgcccttggccagaccctccaaccccttgccgacagcgtccaggcccggggccagtgactcctgggcagagcctgcatcctccctctggctgcctggggacccaccttcatagggacactggccataggtgaaaacctcgtgcagcaggacgccgaaggaccagacgtctgacttctgggagaagacacgataattggccgcctcaggcgctgtccacttgaccgggatcttggagctgctgctcggggagtagatgtcgtcctgggggcgagggaaggcccctggtagggcaggtggaccggggtcccctcacccaccccctctgggtcaggggcccagagcctccgctgaccttgagcagccgggccaggccgaagtcagccaccttgcaggccaggccgtcgtccacgagcacgttccgggcggccaagtcccggtgcacaacgcgctgctcctccaggtagctcatgccctcagccacctggcaggcaaagcccaggagtggcggcagacgcagggcccggccctcgggggctgcaggagacagcgcggggtcttttagggcacggggccaacggccggtgaggccagcgtccacccacgtcaccttcccccatgcctcagcctcctcatctctaagacgtggcgaggatggcatggccggctaaggccacgggaagccccaagtgagacagggcgagggtcctgtactcaccacagtgacccggcagccggcccaggcccccgacaaagaccagggcagagaagagccagaggctgggctgggtctatgtcacattagaccaaggctggtgacccagatgggaccgcgccccccaccgcccccgaacaccagctccagccccggagccacaaggctctggcctggcccagacctgacgccagccccctgttggctggagaccagacagggatgggatctgcagccggggccacctgctcccggtagagaggcccggttcacctcggaaaccccgcaggttcagctctgcgccaggagggaaggggcggtcgcaggcgcgtcagggccacgtggcagcagggaggggactcactgcccaggaaggcctgcaggttccccttgcgcatgagttccgtgacgatgtacacaggctccccgcccgagcacactgcgtgcagccggatgagccgctcgtgccgcaggcccttcagtgtctggatctccttggcgaggtcagtgagcttcatgttggctgcgagagagggtgtggctccaggaccggcccacgccacgaacatcactgccctggggcttgagggttggacagcaggtgcggggcccggccgtggcgcaggatctcggggcctcacctgacttgatgaccttgatcgccacgggcagggagcccagccacaggccttcccacacctccccaaagtagccttcacccagcttcctcccaagggcgaattcggagtgtggccgctcccacacgtcctgcctcggggccttctgcagggagggtgggcagggaggctggtcagcgtgggcccctgtgctctgtcccaggcacagccccccacaccaggcctctggcgggcacccctgtccccagcacacactcaccccaccctggctgggacaaaggggagtgggtgccaggcttggaggcccggcccagccccgtgggagctcattgctctgggggcctaagtggcacctttgccccagccggatatccgtctacacatgctcattactgcccctggccgcgctgtcattatgagaccagagaaaccagactgctgccctggccctcggcagggtggctcacatcggggacagtccccgggatccagtgtctccagcccaggtgcagcatcttgtgatctgcctctcctcccacaccttccgcccttggggcctggggcagccttgagtgccttccccaaactggccccaccctcctggctgctcccctgcagagctgggcactgctacaggtctcctttccccactcccagccccctaggaccccaggaatcccaacaaccctcagaggcacccgcagagagcagaatgtgctggaaccgctgggatgctccgatgctcccaggcctgggcagggccctggagctgcgcctctgacagccccaggggttttgtgacggggtggggaggagcacctagaacagggccatgcctcgggcccagcatggggcagcttggcaggcacaggcccacctggggcatgcagggctgcagcagggggttctggatcagcttccagttggccttgtagtaggtgagcagctcctccaggccgggaaagagccgtcccttctgcaggtagaggctgccatcagctgccatggagacccggtagtggcagaccttggcctgggcccggactaggaagggttcagagatggagacccctgccttggctgccagctgccccgaccctcccaccccagaggatgctggccacaacccactaaggggtctggctcagacctagctggggaccctgagatggtcagagctgtgtggaggagggagtgtgggcagccacaggctggggcggggcagcgagagcggcccaggttggagcttttctgctgacggtgtgcacagagtaggcacttaataaatacttgtagaatgaatgagtccatgagtcagtgaatgaatgaaggaataaggaaggaaagaaggaaaagtgaatgaatgaatgaacgaataagcaaatgagtgaaagaataagctagtgaacaaatcagtgaataaatgagtgaattagtgagtgacgaatgaacgagtgaatgagtggatgaatggatgaatgaatgagtgaattagtgagtgaggaatgaacgagtgaatgagatgaatggatgaatgaatgaatgagtgaattagtgaggaatgaatgaacaagtgaatgagtgactgaatgaatgagtgggtgaatgactgaatgaatgaataaatgggtgagttagcaagtgcaggaggtgaccagcatatctgctgttgggccctcagtggcgccgggtgtgaatcaggagccagcactgcctagagaccaaccaccccaaggtcaagggccactgacctggtgggggacagaggcaggaggggccgccccaggtacctgacagtgagtagcccccgaggctgctctcgctgggccggatgaggaaggcccctggttcgttgggtggggagaggagcagctgctgtgcctgggtccgactgaccccgctaaagtaccagctgcaaacagcaggtgcggcagtcaccttgcaggcccctcagccagtggccccacatgctctcctccgtgttgccggcagggctgagcccggctgtcccaccgcctcagggagaaggtccaccccgtggactttgagtcccagctcaaggtctgcactgcctcagcccccagtgccggcctcatcctcctgctcagccctgagcatcctcacgttggccgtgggctctccgttagccctgctgggcgtgacctccagttccctgttcatagtgaccgccagccccagccacaggttaacagtcagccctggccatgggccataggcctccaaactcggcttcgctgagcccctgcacagacatggagctgacggcctggtgagctgcccggaagcactgctgggctgtcgtggctgtacagggccatgggcatcacctggctgggcacggcccacctgcctcaggcagttggttagtggagggggcccatgcaagctgtgtcctgaggaggcagcctaagccaggctgtgcaggaggtcaggaggggcagccagtgggcggctgcaggggggttgctgtgcgaacgttcaaagcatcctgcatcccatgctggagagttgtgcccagtacaggacggccctaagcccactggcgtctgttcgcacagacaccccctcggaaaagccaggtgcaggtgagacctctctgaacacggtggcagggtggcagggagctcccaggtgcccactcctcagatgcccacacacgaggagcccacaccgggtgtcgggagaggggccggctgggtctcccctgtccaggtgggccgcccaccaggtcacatctactcattcctgggagccggaggcatccttggaaggaagacagaaatgctcccagccccaccccgtctgcataactctgctgctgaagtccaaggcggggactccacacctgactcagcttcccaccctggagcctcccacttcctggagcttcctgggacccggagagggatgcctgccactcccctgccccagggcacaccccgtaagcaccaggaggaagaagcagagtgagccggtgtcagggtggggctgaaaccacctgggaagcgggactaggagaggacccgaggtgggcctcagagtcaacacaagattcggggctggggcacggccatgccatcctggcagactgggactgggcaagacggaggacacagtctggcacccctgccccggtgacctagggggcaatgggggcagcaggaatagaaactgacatgaccagggccgtggggctgggcttaagttgaagggaatgaagatggagacaggaagaggtgtgggaccagggacagagaggcagcggcctgaggcactgactccatggacgctctgtccatggagctcctcctgcagccagggcccctgccttctggggtctgctggcagggagacgcaaccctctcacgtgtaaagggactcaggtccctcccagcaccgtggggtgtggggatgagacacaggtgtttccccaaaacatcgccagcctcctctgaagcccacatcagggcttgggggtcagaggtgagcccctgtgggatcctgagatgcagaggatgtgtctgaggtctctccctggggcgtggggccaggtgtctggagctaatgacacctgagtgtggttagtcttttaatctccagcctaggcaaatagtcattagctttgcctatggaccgccctgctccaccacgagccctgccctccaggaactgctgaaggggtctgtcctccacacctggggtgactgtgagccccttcccatcacaaaggctgcttgccccccaaccactgctcaggacaagcggggcaggtgtggggtgagggcctggggcccctcagaaggccccttcctgtgactccggcttcacccgcccatgcaacccccaggacgatgtgtgagtgccaaagggcccccaggaggctggaagtggccctgagcaaggctgaccccgaaggtctccagggctcaggccttgcccagctggatgccagaccaaggcagccgctcagagcagccgcactgggcatctggactaggcgcctctgcaacccctgctcacctgccctcacccagagctcctggagcgtgggcccctgtctcagcccccagtcccagcccctgctcacctgccttcacccagagctcctggagcgtgggcccgtctcagcccccagcccctgctcacctgccctcacccagagttcctggagcatgggcccctgtctcagcccccagcccccagcccctgctcacctgccgtcacccagagctcctggagctcctgtcatctggtgcctcccagcccccagcccctgccctccaagcagtgaccgatccatgaacactggactccctgtgtgagggcgggagggcctggccagccaggcagggtcctggaggaaccgcctgctgggtgtccagctggtgcagctgatgctcccccccacaggacctgaccacgcctgccggagcctcctctccctctcggcagcccacagcggacactgctgttttcctaccacacctgccggcccggggcccatcagctgtccctgaatgaatgcgtggatgaacgaatgaatgaacagatagccacggacatgcgatttccaactcaaaatcctgccgttgttctggactccccagctgggggcgaggcaggctctgactccgaggccgaggtactcacggttggtctgagagcgtctcaggagaagccttggccacgtgggtgatgggcacgagcccggcgctgggctggcccgaaagcctgcgtgcgaagatgtagccgcccccctcttcgagggcacagagcctgtccccgcggcggacactcagctccccgccacaccgcgccgtgaagtcatagagcgcaaggaagagctgagggaaggggctgcaaggctcggcggggagcgtgggcactgggtcagtgttggggtccagggacccgggggtgccatggtccggctcgccgcccgccggccagatcttgtcccagaagaaggacaggaaggccagccgcctcctgaggaacggctccatcccccggggtcaccacgctgggcccgagggccatgggagcccgcgagcccggaagaggaactggcagggccggtgggacccggtgtccagcgctccctgccctggccgtggggtgacaggggaccccggccctgcggtcactcagaggtcccctggatccaggaggcacacggttcccaccggcgtccgggctggcgttggggctgggtggggcgcagggcggaccccctgcctcaggcacaccgacagcacctcctgtcctcgacctccttggcgtctggagtgcaccgtcccctccccaacccgacggcagagggcagcttgggctggggcgggggcgggctccaggaggggcccgaggagggcggggtgggcagggccagcctctctcccgccctctgcaaggcccaggcaggcggaatggctctgcccagtcaggcctggcccatgcccaagggcaccacagtccaacagccgcccgtgcccacggagaagtgggggttccacggagaagcgctgctgttcagcacctgcagtggttgccaagcctgagctgcactcaggtgaaaaattgcctgcttatttaagtgttggccagatattttaacatcattaaccctgcaccaggtgccgagcctccggcctctgcagtaaattctgaggacaggcgagtgagggggctctcagcaccccggctttcatgcagtaaaacgagatgctgattgcagggagctcggccgcaggccaggcacccagatgccccatgctgcccgatgaccggcttctgagtcagtcaatgcccaggccatacccaaaggccactgcggggaagtggaggctgcggacgcctggccccagttcagggggatgagcacacggagaaggggcggcgggtgagtccctggctggggacctcccaccctctccctggacagcgccaagcccccgcatgctgaagcaaactctgcccgctcaggtaggtccccagatcggggcaggactgggggagcaaatcccagcaaaacccagcagcacggtacagggtcctgaggcaggaggatggggtggtggccatctgcagtctctctctcctcccacatcccctccgggtcctgagtggggtggggtgggggccatctgcagtctctcactcctcccacctcccctctgggtcctgaggcacgggggtggggtgaggccatctgcagtctctcactcctcctgccggcctcccccagcagccccttccgcacctgggtggccttcagggagcctcacgcccctttcccacatctcacacgcatccatgcccccacttcatgcgtgtggctgaatgcatccctccaataggcgtgaccagtgtccagccaatgacaagcccctcgcacctgcctgccctggagtcacagatgggcttctcagaaacctcacgtctggggactggtgtgtgcattgtggggtggcagtgacacccgtggcctggctctcagggcaccccagcagccaagctgtgtccgggctgatagcctggagccagcaggggccctgggagactggacatcgccaggctcagggcaggctctgcaccagagaggtgccctgctgggggtggtggggggtgttgagaaatgtggagaattgtaaatactacattgggggtggccttcgaggggccccagcgccttctcctcccgcgcttccccccgccgccctctcctcccgcccccgccgccctctcctccccccacccgctgcccgtctcctcccgcccccgacgccgtctcctccccacaacccacccccgccgtctcctcccctccactccccccgccgccgtctcctccccacacccaccgccgtctcctcacgtgcaggtgaggcttttgcccaccatttcttttctttactttttttttggaaacagggtctcactctgtcgcccaggctggagtgcagtggcagcctcgatctcctgggctcaagccgtcctcctgccggactacaggtgtgcgccaccatgcccagataaattttttattatttgtagagatgggctctcactatgttgcccaggccggttttgaactcttggcctcaagcgatcctcctgcctcccaaagtgctgggactacaggtgtggctaccagctctcccaaatcctccctaggacgtgactcttccccgctagaacgccaaggccgcagagccccagggaggcctcctcaggccatggaaagctcctgtgcccaccacaccagggtcagatgttcagggcactgaatgcagattcctcccagacactccctgccccttagagccacgggatcatggcacaggactcagcacattccatgcccagctggaaccagaggcaggcctggccatcagggttagggccccattgggcctctgccccggcgtgtctcacccccaccgccccacctgcccacagatcagctccccacgtctgccccatcttccccctccttgcacctgctgcccttgcaccgcacacatgccagggtgagtgtggtcggcaggcagccgaggccggctttatccagctcctccccggtggtcctcagaatccccggccccgcatgcccagctgccctgtcccgctgccctccaagttgtgcccgcccgtccaccccttcctcacctcacccaccaggcgcaacacagcccagcatagggcccctgccaggtgtcggtgtcagcagccccttccctgcctgctgtgccccccccacatgacctcacctcctccctcagccctaaccgggtgggtggcacagaggggagtgaggaaaggggcctgggtacaggatcagtctggacggggtcaggagtctggggcttggccgggtgaggcggctcactcctgtaataccagcatctggggaggccaagcaggaggatcgcttaagcccaagggttcaagaccagcctgggcaacatagtgagacccccatctctatttttttaaaaaaagaaaaggctaggcacggtggctgacaccagtaatcccagcactttgggaggccaaggcgggtgcatcacctgaggtcaggagttcaagaccagcctgggcaacatggtgaaaccccgtctccactaaaatacaaaagttagtcaggcatgatggcgggcacctgtaatcccagctactcgggaggctgagacgggagaatcacttgaatctgggagacagtggttgcagtgagctgagatcgtcgcgccaccgtactccagcctgggcggctgagcaagactccatctcaaaaaaataaaaatgaccagggctggaatcctgctgtcagactcactgtccacatgaccttgggcatacagtgctgaacctccctgtgcctcagtttccccatctgtaagagcactgagcttacaatggcagtgaggacacagaccagggggatggggtgcagggcccttcctggtgttcagatggaggcttgtggcaggagctctgccacatcaggccaccccccatccgggtttatgtgtctggagggcacagctctgagggtctcagtggtcagcgtgcattctctcccccaagactggccccactacccccaggcttcaccatcctcagggcccagggaagagagcttgtccccaccagggacaacagatccaaagtgttcactgcccgtgccctggtggccacaaacagggttgagcaagactgagcacaaactggcccctggtgcccagcagtgaacaggagtgactgttgaccctgcacagaggggactatgctgagcgcaagaagccagtcccaaggctgcatactgaaagcctgcactgataggacattcttgaaatgaccagacagagccggagagatgagtggttgcagggctagggagaggtgggagggagcagcgtggctgtaaagaacatgtcagggtcccgtgggggtggcactgccttgcgtctgtatcgacgtcaaggtcctggcgtgattctgcactgcagtcctgcaagatgctaccactggggatgctggatagagggtaacgggacctctgtgttacttcttacaactgcagatgaatctatacttatcttaaaagtaaaagtttaactttattattattattattattttcgagacaggcctctgtcttattgcacccaggctggagtgcagtggcacaatctcggctcactgcaacctccacctcctgggttcaagcgattctcctgcctcagcctcctgagtagctgggactacaggcgcccaccaccacgtccagctaattttttttttttttttgagacagagtctcgctctgtcgcccaggctggagtgcagtggcgtgatctcggctcactgcaagctccaccttccaggttcacgccattctcctgcctcagtctcccgagtagctgggactacaggcgcctgccaccactcccagctagtgttttgtatttttagtagagacggggtttcaccatggtctcgatcacgtccagctaatttttgtattgttagtagagactgggtcttactatgttggccaggctggtcttgaactcctgacctcaggtgatctgcttgcctcagcctcccgaagtgctgggattataggcgtgagccactgcgcccagccattattattctttttagagacacagggtctccctctgtcacccaggctggagtgcagtggcaccatcttggctcactgcagcctcatcctcccaggctcaggtgatcctccggcctcagctttccaagtagctgagaccacaggtgcacaccaccacacccagctaatttttcaaattatttgtagagacaggggtctccctgtgttgccgaggctggtctcaaacttctggcctcaagggatcctctcaccttggcctctcaaagtgctgaggttatgggcctgcgccaccgagcctggccaaaagtttaactttaaaaaattagattagaaatcagaaattgaaagaaagggggtagggtggagcccaggagaggggagacatccaggacctgcctggccccaaaagagaaggggaggctgctctgcccccaccccgcttctccgtcagtgggctgcagggccgggggtaaggggtctaactcctactgcttcccaaccctccgcgtcagacagcacccccttctccaaacaaccccggctttgtcccctggagccctaaataacaataacaatagctggcatttattgagttccagcccaggcagggagggcagggcagaaacagcacccaacaggactgggtgcaaggctcacacctgtaatccggaaggatcagaaagacccaggtgggaggatcacttgagccccgggggtgaagactgccgcatgggtgacagagcaagacgctatctcaaaaaaaaaaccacccacatccacccacttcctgccaggcctaacccctggggcctccatgcaccaagggaaagctcttccagggtggggtcaccgggaggaggggggaggctcaagttacagaacagcctggtaggggctcaaagacgcccatcctggaagaggccccagcactgacctccgtgggggtggagatgaggaggatggaaagggtgtcttcctccagcatcttcctgaaggtgaaggaggggcaccttggggtgtctaagattgtgaccccaggagacccccagctagctggggtgtgctgtgggggaacggggggatcccagaggccctgagcccaactgaacagatacagacgggaccagatggcctcagagctcccctgcggggctccctggagctatggagaccccatttatccagagtcaggtcggtgcctgagcttgggcagccccaggtggaaggagcccatggtgggaggagcctgtagtgggaggagcctgtagtgggaggagcctatgatgggaggggccgtggtggggggagcccgcggtgggaggagcctgcgctgggaggagcctgtggtgggaagaccctgtggtgggaggggccgtagtaggggagcccgcggtgggaggagcctgctctgggaggagcctgtggtgggaggggccgtggtggggggagcccgcggtgggaggagcctatgatgggaggggccgttgcgggggaggggggagcccatggtgggaggagcctgtggttgaggagcctgcggtggggggagcctgcggtgggaggagcctgtaatgggtggcatctgtaatgggcggggccttgctgggcagagcccgcggcgggggaagccgcccctctcctctgtccaggcgctgggtggtccatccgcctggtcaccggccactgcctctctcccaaattcctccgagggattcccgaggagtgcgctcggactggggggttgagcaggaactccctcccagtcacccgaggctcctgcgccccgcccgaagccgggggtgcgtggggagtggtgcgcccgcggaagggctccgggacgggaaccccccttggagcctggctcttggaccagccacccgccgtggcccctcagtcggggacgcgggcccccagaagtctggggctctccaggaagcgaagcggatggaagattactcggctcggggtcccgggtccccacccccgccccgcccccgggccgcagcgtcacaaaggccgctggtccccagggcaacccgcggagtgcggagggaggctgggctctgggaagtccgcgcgcggctccgcttcagaggcagggcaagtgggcgcggtcctggggcggcggcgggggccgggagaggagggctgggggtctcgagaaggtaaggggcaggcagagcggccggggaggtgggcccgggccaggggagccaaggggagtgtggtggagggggtagagtgcgggcacctggtggtctcagggaagcgggcctgggaccggggcgtgtaggaagcagcgaggggctcagaaccacctttccgggttcacgaccagcctctctgggtgttccacctgggcagctgctggagactagaaaacatccctcacacgtcacagaggcacggtttccctccagcggtgaaatccgccccagcctccagcaagagcagggcttaggcctggggtcctggggtcctgctctcagctggcacctcaccccagacacactccctgctgcccccaggggcctgttctcgagggattcccgaggagtgcgctcgtgaagtcatatctgcctcacgcccaaaagggcaacccttcccgggcagatatgacttcaccacgtacctgtgtggccctggggaactcagcaactgcttagctctcatttgtgggtcgtccaaggcccaagtggctgtgacaacctgagatctccagggttgctgggagccggggcagcaaccaggggtgcggcttgctctccagggagctgcggcagagcctggggccacagctgcactcagccggtgcacccacggacagagggtcagactcggctcagcactgggctcaagccctggatgagaacaagaaccaagcttcttagcctcaggctccatctgggaaatggagtgtcacttgtggagtccatgagctcaccagggacaggatcccgggtccacagcgagggcccacagcgtgggaggagggctgctcctccgggcccaggcctgggcgccctcctcccatgctgaccagccagctggcctcgtctttggtgaggcctgtctctgtgccctacaactgcggtgaggcgtggagcgtccccagggagaaccggagcgggaggatggcccgcgaatgtccccgagggggatcctgtgctgcttaggaccacgccgtcccctctccacggccccgaggggtgccagcaacccctttcagcagcagggttaggaactggggcccttgcaaggccacaggtcaggcggttctggccagaagtccgcagtcctagttcttccctgtcctgtcccacaggccactggttgtcagtagaggtttttgcccctcagtataaactgtgtccagatctgtaggctgcccatccagccctccaggcagcctcttcccatcgagttgtgcccccgaagaaggacagaggtccagcatggggtcagtgggctgaatccatcccccgaacatgccacagcccaggggaggccagcctgcctggcagctgacacccagccctccccccagctcccggataatgagcacccatgtggcaggcctgggcctggacaagatgaagctgggcaatccccagtccttcctggaccaggaggaggcagatgaccagcagctgctggaaccagaggcgtggaagacctacaccgagcgccgcaatgccctgcgtgagttcctgacctcggacctgagtccgcacctgctcaagcgccaccacgcccgcatgcagctgctgcgtaagtgctcctactacatcgaggtcctgcccaagcacctggccctgggcgaccagaacccgctggtgctgcctagcgccttgttccagctcatcgacccctggaagttccagcgcatgaagaaggtgggcacagctcagaccaagatccagctcctgctgctcggggacctgttggaacagctcgaccatggccgtgctgagctggatgccctgctccggtcgccagacccacggcccttcctggccgactgggcgctggtggagcggcggctggcggacgtgtcggccgtcatggacagcttcctgaccatgatggtgccggggcggctacacgtcaagcaccgcctggtgtctgatgtcagtgccaccaagatcccgcacatctggctcatgctgagcaccaagatgcctgtcgtgtttgaccgaaaggcgtcggcggctcaccaggactgggcccggctgcgctggttcgtcaccatccagccagccacatcggagcagtatgagttgcgcttcaggctgctggacccgcggacacagcaggagtgcgcccagtgtggcgtcatccccgtggctgcctgcaccttcgacgtccgaaacctgctgcccaaccgatcctataagttcaccatcaagagggccgagacctccacgctggtgtacgagccctggagggacagcctcaccctgcacaccaagccggagcccctggaggggcccgccctcagccactctgtctgagagatgattttctaatatttatccactaataaagaagagtgtaaatgcacatatggaattaaagaagcaaacctatttatgttttaaaggcagcagccaccagtgtttttcctggctcaaaacatgccaagccccaggccttctgctcctgctctttcccagggggagccacaggccggacctcccaagacagctgagcctggagcaagaagtaccagcccctgacacctacgggtccaacgacgacgacaaaagctgctccacggggcctctgcggtcctagcccccgcccctcctcaccacccccatcaccgtgaccgggctccggccttccttacccacctccctggcttgtggggctccctcagggaatgacactcctaggccgtgatgcctcccaccatcccctgcccagcctcgagtgctcatcagcacgcccgcccgaggaggcagcagcaccaccggggatccctggctgtgagcagctcagccgtgcccctccatgccccgccccaccttttgttcctcaagggccttcccggccctgagctccctctctcctccaggatcagctgcttttgctaggcgtccagcccctgcgtccccccaccgctcaccttcagggccgcagctgccccttcctcccagaagccttccctggctgcaggctggtgaggtccccaagtcccccttcctagaggcgccttctcatcctctctgcaggcacttctcaagctattgcagaactactcttatttcatgacggtccaagaatagacatggtcttcaaggcagggcccgtccagcacaccaacggggccacagtcctggagactccatgctccacccctccctccacagatgcccagaacctcttttcccacagtgaccatagcccccgcgaccatctgacccccgagctggctctgggaggccacaggagcccctgtggacgcagccacaaatgggccaggtgcggagggaccccagtccacagcggccagggggtcctggggagcagctttaaaagtgggaccagcaggacagtcaaggctggtggcctcagggactttggacttggccagcctggtgacaccggagcagctctggagctgtggcttgtccccaccacaccaggcacggccctcccctccccacacaggcagccggagacaccggccctgcagggggggtcgctgccctccccacgctcctgcgcccagcgctctgcagtgggccctcgacggcctccacggccgcgtcccaaaaccgccctccccacgcccctgcgcccagcgctctgcagtgggccctcgacggcctccacggccgcgtcccaaaaccgccctccccacgcccctgcgcccagcgctctgcagtaggccctcgacagcctccacaactgcgtaccaagcacagtgaccatccacttttgccccccagccagacctcaaacacccagaagtgagaagagctttcagagtggttttatcattaaattaatatctaatcacataattcaaagatataaaaattggaatgtagaaggtggggcaagcccctccctcaggactggaggcggcagcagggacagagccgcactgaagcgggtgagcgtgcgagaaacatacagccgagcaggctgccccgaacactcagtccagggtggaagcatcgccccggcaccccccaacccccgagcccactgcgcagcccacaggaagagtgcaggcttttcacatttcagagggtggggtggggtggggtggggcggggtgggcccctggctttgggctgccctccagcagcccctgaaggacacaggcggtgatggtgggagaaaggccccctctcccagggaggcctccttgtcctgagcttgggctgaggtctctgttccagtaacagatgctggttttgttttgtttttttttttaagacagggtctcgctctgtcacccaggctggagtgcagtggtaccatcagagctcactgcagcctgcgcctcctggagtcaagcgattctcctgcctcagcctcccaagtagctgggattacaggcgcccgccaccacgcccagctaattttgtatttttagtggagacggggtttcaccatgttggccaggatggtctcgaactcctgacctcaggtgatctgcccgcctcggcttcccaaagtgctggattatgggcgtgagccaccacgcccggcaggatgctggcttttagttcatttaaatagaaaataaacctgaactccacagacaccatccagagtgattacaggtggcgtccaaaggtcaaagggcagcctccacagggtttccttcctggttctgagacttcccagggacagcagaacttccttgcactggtcccaaggaagcccctcttggccaccctgagaggtgttcctgtccccagatgcccaggaggagcaagagtgtggggaccggcccttgccgttcctcctccaagtccacccacttcctgccccagggagatcctgaggccaggaggcaggctggcccaggcaggctgatggcggagggtggtggggagggtgggggggccctggactttccctcccagtcctggcaccttgcaggtggagagggctcttcaggaaggcatagttggcctcctgcagacgcgcacctggccggcaggcacgagggtctgctgagcctcgcagaagtccaggaggctacgccagagggggcagcagcgcagaaggaggtggtctcctgtgagggtgggagtcagatgggagtcagtcagggtcaggtgggaggagtcagggtcaggtgggaggagtcagggtcaggtgggagtcagtcagggtcaggtgggaggagtcagggtcaggtgggaggagtcagggtcagatgggagtcagtcagagtcaggtgggaggagtcagggtcaggtgggaggagtcagggtcaggtgggaggagtcagggtcaggtgggaggagtcagggtcagatgggagtcagtcagagtcaggtgggaggagtcagggtcaggtgggaggagtcagggtcaggtcggagtcagggtcaggtgggaggagtcagggtcaggtgggagtcagtcagggtcaggtgggaggagtcagggtcaggtgggaggagtcagggtcagatgggagtcagtcagagtcaggtgggaggagtcagggtcaggtgggaggagtcagggtcaggtcggagtcagggtcaggcaggagtcggcagctccctagcccagccctggcctcacctgtgttcccaccctggaagagcccagccccgccctcaccgatcaggcagagcccctcctgggcccgcgtgacagccacattcacttggttggggtccacaacgaagcccagaaacttcttgagccagctcttggtgggccgctggtccaggtcgctcttggcacaggtgcggacggtgctcaccagcacatagcgccactcgctccctgcgggatgggaggtgaggccctgctgccgctgcgcccaccctcccggccccacccacgagcccccagcctcaccctggctcttggtgatggaggacacggccaccccggcgatgccctctcgccgaagggccttgctgatctcagaggcctgcgcgttgtagggcgtgaggacggcgatgtcctggggctctacggtcctccccagggtcagctgcttggtgatacggacctgaggagccgagggggcaggtggagcggaccctggtgtctctcctgccctcctccaggaagccctccctgactcacaagcaccagacactcaccacctcagccacctcctccagaaagccctccctgactcacaggcaccagacactcaccacctcagccacctcctccaggttggccttggagttctcattcccttcgtccgtggacaccagcaggctccgctcgtggccctgcacgtggccaaagatgacagggcagctctccttgccagcgtggcccaggacactgggcggcctcctcaggccctgccacgtcttcagcttgctcttgtagaacgccacagaggggaaggcacagatgccctcatgctgcaggcaaggatgtgcgctggtcagaggctgccacgcggggttgtggccccccaggggctgcaggtgggctgggggctgagtggggcgggctcaccatgcggtactgagtgtccagcatatgtgcgtcctcgtggtaccgctcgaacagagaccggtccagacccaggttttgcagccgctcattcttgaccacaggccgcagctgcttgtggtctccgagaagaaccacctggaggaataggcaggcctggccctgacacccctagacccagagggaccccagccccacacgacacccgcgtctgcacacacagggcaccccaggtgggagactgtgccagggacgcctgctcatgctgcccacaccccccgccgaccaaccttctcggcctgtgggaactgcaccagggggatgagggtttcaggttccgtggccatgcctgcctcgtcaacaaggatctgcctcacgtccaggattttgaggctggcagaggctgcacaggagcaggtgcagaggatgacctcatgccggtccagctcgaacttccgagcctcccacaagaccttcttgtacctgccggggacactgcttgtcaccccagggcccccatgctgcaggcagctccaccccctggcccctgccacttaccagaccaggtcctccctggagaagagctcccctctctgcagccgggtgtcaaaggccttgatttccgacgagtaagggttgggggcctgccggatccggtggtgcagggtgatgctcctgggggacaggacacagtgagccctgtccacgcagggccatcacgggggcagagctcagtgagacccacctacacaggactgtctggacagctcggccccactccgcccaagccccaaagacagcaggcacacctgaggctctggttcggcctcccctcccgggggctcttcctgagcagcttcctgctgcccacacgcggcactgggaactcgctggcctcagcctgctcactgtacacacggaggggcttcagctccatccttctcaggagcagtcctgagggtagttgggggacgtgagtcctgccccgcgtgccagctccccaaaggcccccaccgccgaccccggcgcacctgccaggacatccaccgacttgttggaggggccgcagtacaagatgcagggaccccccagccgcttctccccacggggggggcctccgggctgcacctgctcctggtttgatttatgaaaccagaatacgatgtggaggcccacgatcgtcttccctgtacctgcagccagagaataggagattgtagcccaccctgtgggtccctgtggcccaaggcagcctgcggctcccccggcatgggccctacctggtgggccctgaatgaccgtgaaaggcttctccagagcctccctgaccgccacgttctggctggggttcagcttgtggcggcctccggggatgttgtaggtctgccgctccaggaacctgctggggatcactgagagggggcagcctccctgagcactcatgcagggtggggctgggggccagaggggaagctggaggggtggggcagacctacctctgcagaggggctgcgggacaggccggcccagtgcgatgctggtgaccagcggggacgcctcctctagtccacgcacggcttcctccttgcggctgggggtgaaggcagacactggaaaaccaacaggactcccaggaaaggggctgctgccccacgagctcccccctcctgcaagtgaggggcccggggcggtcccccagcccagcctctgctggtggaagccactcacagatcaggaagctgcttgggcagcagctcaacggtgaacagggtgcccggcctcagcacctcttccggaaccttctccatgcccatgtggtggacgaagaggtgcacccgtctgggagcctcctgccggtctgcccggcgctcctggtcccagtcctgcgtctgcccgtgggccacccaggtatacgtgccggggtcaacattcaggccagggccgaggctgctgggcccagggcgtgggctggccgtgggagccggcagcccctcgagccggatgcagaggtagcagcagctgaagttgatgtcggcacagttctcctcgaggaaggcggcctccaggcggaaggcgccctgcagctgcccctgcggcgtccgtgacgcctcccaggagacactcaggtgctgaagtgtgacggagtcattctcggcaaccgcgccggtggccgactccagggcgcagaatggttcccacacgcaggcgtactcatccacgtcgcggtaccggtccctcggggcccggtacacacggcctgagaagcagtctccgggccgctccacgtgctccaggcagaggctgaagcccggtgccaccgtccagagctgagggctcggtaccaggaagccgtgctgcaggctggtgccgagctgcacctgcagggtgtccccactgcccagctcccgggccacctccaggaaatggccacagtggctccgctgcacctgcaccagctcccgccgctgggacgcctcgcccttctcctggatgagagcagccgcctccggccagcgctgcagctccaccagctccagcagctgcttccacagggccgtctccacggccagggtgtgtgggtccggcacagtgccaggcagtggcaggggcgggctggatccctgcgctgagtagacacggcgccgccacaggagccgcaggcccggccggcctgccagggcgtgggggtgctcggccagctgcagggagccgtaggggacggggcaggggtcaggcagcgtctcccggttgctggggaagagcagccggaagcagcgggagcccgcctccacgtccaccacgaagcccagcttgtccagaggctgggccttgagctgcacggccaggtgcaggctgcgcgcccgccgctgatagctctgggcaagtgcgtgctggaggctgaaggcctggcagagcccatcgatgtccctggcagagtaggcagagcccccatggcccagcgccagcaggatctgccgctgcaacaccacgtccaggtacctgcggatgggcgaggtggcccacgtgtaccagtccacctgcagcgagtagtggccgccctgctgctggtggccccgggcgcagcggccgaacgccgagcgctccagggccttgcggaggtcgcggcctgcaggagccaggaatgggtgcatgtcgtccgtggtgaccaagtccaccatctgttcgtagtcctgggtgcgggcagcaaactggacctgcttccagagggaggccaggaggtgcagccgcgtgtcggggggactgcccccgccgccgtgcaggtggtggccgaggtgcagtgacaggggcacccggtccccatgcttctcacacagggccttgagctgctggctgcggggtgctggctgccaccgcagaggcgtgaccgtccgcgtgcactcgctgcccaccaggaactcagccacgagcctattaaactgaatcatgtactccttcaccatgatgtgggccgcgcggaagcccagggtgccgtcctcgtccggctgctcatagaagcagtcggaccgcaggcggtgccggcgcagcagccgagagaagtagcacgcggccacgacgcaggcgtccacggagtccaggcgggccggcagctcacggccggcacccgggtgctgcctgatcacctcctccgcctcctcgtaggacagctggcggtcagactggaccacggagggtgcaaagcgcaggctcttcagctggccactggccttctccatggtgaggaacagggagatggccaggcggtcccggccaggcaggaggctgaggacgtcctggcagaggctggccggcagcatgggcactggctccctgccgggggcatagaacgcagcgccctgccttcgcgcctccacgtccagcaccccgtccctgggcacgaagctggccacatcagtgatgtgcacagccacctcgcacctgggacccaggtctcggacactgagggcatcatcgaggttgcaggcgccctgggggtccacagtgaaggtcaagaaggcgcggcagtcctctcggcggccggcaacccggccaagctccgtgtggtatttctgcagcaccttggtgatggtggcctggtccgacgggggcaccctcaagctgtactccaggccgaggatgcggaggccctgctcccaggtgctggcctcaggcagcacctcccggacgatgcccagcgggtagtagaagccttgccgccacaggacaatttggacccagaagagccggctgtgccgggcctcggcggtgagcctctcaagccccacacgctgcagccggcccttccggaggctgtagatggggacctgcgatgggtccttcagctcggccacgaagatcttggtcacggagccattgatggggaccatgatgcgcgggtcccacgtgtccatgcggcacacaaacgccagctcgtgcctcttcctcttcagcacgcccagcacgcggccccgaagccgcccctcgggcgccttgtctcccgaaaggagctgcaccagcacctcatccccggcgaaggccatcccacagtccaggcggcccctgacctggatggggcccgaggaggcatcgtccagcgggatggctgacgcccgctcgaaggtctctggcacgaaagagcagtggcggtaccgctcgggctccgcgtgcagcagcttccgtagcgcagccgggggcaggttctcgtacagccgggcctgctgcagggactcgggcctggcgacagtgtccagcagcccgtcctccccgacggtcaccatcaccttctggctctcgtccagaagctcccgtaggatggcgtcgtcagcgttgagctccccgtcccacggccagaagtcagcctctgcatcctcagcctccgtggactccacgcccgctgcagcagccgctcctgccgcacaggccccgggcaccacgtcttccttcactgcgtctcctgctggtgctgccgcagcctccgtctgcgctgtggttgccgtgatgtcacgggatgctgggctcagagcctcatctcccggctctgccttcaccatggccgtcaccacagccgcctgctcctcggccaggtcccctactggctctggggcagcctcccagttccccgctgccccagcctgtgtgcctcggggaggccagcgccgtctctgcgccacaccctgctcgacctgctccatggacaggccctcggggcagacactgtgccgctccacgcactcacggatgaagctctcccagagcttgccgcaggccccgaaggagcagagggccacggcgtcccccactaccaccagctgggactgggcgcgggtcaggacggtgttgagcacgcgggcgtcggtgaagaactcaggggccagtgccccagggctgagcaggctctggcaggtgtgcacagtgctgagcaccacgacccggaactgccgccctgcagggggcacgcagtcaggtcaggctgggtgcgcaagacggtgggaccagccccacccctgccgatgccaggctgaggagtgggccgagccacccggggtatcctggggcagctggcagcacctggccccgctggtcacccacctggcaggatctcaaaactgccgacagacacctggcctaggtcccgcctcctcagctcctgcctcagtgcactgacctgaagacgcagcagggccggggatgagtgctggacgcagtgaggactcggccacccccgacaaggagagggcacccccaccaagctcggggatgagcgcaggacgcagtgaggactgggccacccccgacaaggagagggcacccccaccaagctcggggatgagcgcaggacgcagtgaggactgggccacccccgacaaggagacggcacccccaccaagctccagacacctcaggggccgagccccacctcagccctgggaggcaaatactgcagccccctcttacagatggggaaactgaggcgggggctcgtccatcagccggagagctccccctcccccagcaggggtgcggtcgggggctgtcccgggctggccgggctcacctgggcaccgtgggaaacgacacagatgcacctctgctcgcggccgccccagcagctgggccaggtgttgtaggcctcctgcaccttctcgacgacctgcgcaatctcagccagattcagccaggacgccatggacatgtcccggtctgggctgcccgccacgtggcagaacatgagcgggtagtgccgggggtggggcggaaccttgcccctggcgtggatggggttgcccttggccacgtagaagtgccgcgagatgaagctgacaatggcgtccgtgcagcggtagttctcgtggaagaccaggcggctctgccgcgccacctcgtgagtctcctgctggtagcacaggaagaggcggtgcagcagcgtgtgctcggccgcccgggccctggccacactgaacagccggggtgtgacctgcatgtggtcgcccgccagcacgaggcgggtgccgtgcgaggcataggccagcggggtgagggcctcgcactccagcatctgggccgcctcatcgatgagaatgtgggagaagaagccgaccggcaccctgagctcacgggcctgggaggtggtggtgaccaccacgcggtgccgcgccagctctgcccgtgtgggcgggcggaaagcctggcggtcgtcggtcaggcaacagtactgcagcgtgactgggtccgtctggctcagcggccggtccgtgtacatcacacggagaggagtggcctcggggtggccgccgctgacgtggctgtggaaatactcccggatgtagatgtcggcggcactgcgggagggggaggagctcatgggcttcttgctgggggcctcagtgctgtccgctaaagcacctactgtgtgcccagccgagctgcccctgagcacagcccttgtctggctgtcagaggtgagcagcaaacactggtgtccctcctgtcaggagtccaaggggcaagaggccacggagggcttcaggcaacacctgggcgagcccagcggctcctctgacactgcagacacctgcacctccctggtccccagaacccccaatccagaaatcagcccgggacgtatggccactgtcccaggctcttcctcccactccccactgggcagggatgggaaggccccggcctggggaggtggtggtggcaggaaccagaggaaaccacataaaccaaaggggaaccttgtggttaggacaaagatctgtgtttctataaaaacgaaaaacaagactcatccccagaagtcctgggtgggccatgctgcagccttccccgtgacactctccttgggccagggccccggcagaggcacccagctcctcacctgacagcagacccggccaccctcggtgccctgagctgggcctgataaagccaaagcccaaagctggtcggctacagggagtgcagaatcagaggactggagcacatccagggggtgaccgcctgcccggtgtagacttgggccgggcgtcaggtgaggtgggggcaggccaggctcgggcttacctgttggtgtgtgtgcagatgagcaccttggtttcaggcctccggatgacctccagggaggccatggccagcgtgtaggtcttgccggtgccaaaggggccatagatgagtagcggggggacacgcctcccatccccagggccccagcccgcgatgagcgccacggccagctcctgcttgcggttgccacgccgcaagggtgggacagaccaaggtctgggcagggcgcaggtgggcaagtcgggcaccaccagctgctcctcaggcagtgtgtccactgcctggtgccagaggcggaaggtcatcgggtcaatctggaactgcacctccaggaccaggcgggcctcaggctgcagccccagggccaagcagcagcgggccggaagcagcagccacagcgcctgctctgagctggcccgcctctccagccgcacctcgaacaccgtattgtcgggtgcaggtacaggggccaccagggctgtgctgaccgcccggcccagcaggaagccctggtctgtgtctggcatcagggaggaggggacggggacctctgcgtacagtgctcccggaggcgcgaagagcatgttcagcgctggcgtctgcaatgccgtcttcaggaacacctggccccgcagggtcagcctggcaggatggcctgggtcagctcatggggccacagctgccagccccgctgccaagtccacgcccccatccgctcccgttgccccagccgctcccattgccccagctgctcctgctaccccagctgctcctgttgcccccagctcacttggccaccagctgctgctgagccgcctcctcctcatagagaaactggtgcatcctctgccgatagttggttggtgagatggggcccgaggccacgctgctgcggttgaactccagggccagggcagggcccttgtacttggccatcagggccgtctgctcggccgtccgctccacgccaggcaccacgtggcggttgccagtgtgccagcgctccatctcctcagggtggccgagcgccagattcctgcagggtcctgggcgacgcccctggcccagctgcagccccagcttttgtagcagcaccggccggcggccaaagtcgaagaccacccattgctcaaaggtgccgaacgaggcagcctgcacacgcactcccacctggaagtcggcagtggagctgggcacacggaagcgctcaccccgtgcgtagagccggcctggcgggaggccgggagccaccagagagaagtcggctcctggctcctgcttcagcagggccacgtgtagcaggggctcctggagaggaggccagacggtgaggggggcccagggctccccccaaccctcccgagaggcagcctggccagcgtagcccaagtgcagggttcaggtcctggccctgccacttcctggatagaacgcaagcaggccacccggcctctgccatcctcagtttcttcctgtgctacatgggggtggctgaaccctcctggggcccctgtggatgtcccgtggggcagtgtgggcagcttgaggcctcaccacccactctccaggtgccagaccctggtgaatccttgtttttgttttggtttttgagacggagtttcactcttgtcgccaggctggagtgcaatggcgcgatctcaactcactacaacctccgcctcctgggttcaagtgattttcctgcctcagcctcccgagtagatgggatcacaggcacccaccaccatgcctggctaatttttttttttttttttttttttcagtagagacggagtttcaccctattggccaggctgatctcgaactcccgacctcaggtgatccacctgcctcggtctcccaaagtgctgggattacaggcgtgaaccaccgcacctggccaaatccttgttttaacccatatactccatagaataaccctgccaaggtgggactgtcctggccccctgtctctaggtgaggagactgaggcagagaggctaagggacctgctgcaggtcacgcaggtgctgagcggcagtgcctcggtattagctccatgacccaggctgttgacgtctgcccgggctgaagtcaccacttccccagggctccctccgcccagtcggagctgttctccgctcacctcagagtggacggcaaacgtccagctgtactgggtcttcctctcctgggcctggtacatcaggggctggttgcaggtgacacgcactccatcaagggtctctgccagctgcgtggaagtctagccttcagcaagaggcctggaccccaccccaccccacccactcccagggcccacttaccacaaggacctcactgctgctgcgctggtactcggccagcagccgctcctggtagggcaccagcccgtcctgccaggccgcctgcccccgcagctccacagcctgcgtgcgccggacccactcctgcagctcctgtgctgagtgtgccttggtgcaggcgtccccatactcacagaggtcaggcctgggggacagggaggtcagcagggctacacagaggcacagccgccgtgctgagttcaaaggccgggacccctcagcccaatactggcctctgtagggagcaggggctttattcgtcccacccactcctgtgctcccgggacaaggcctggctcaagcagttcccaaacatgaacctcccttatccgggtcctcagaggccacatggctttagccctcagcaggtggcagggaggcccccgtccactgaacctgggagcctctggctctgcctacggtgggctcctgccccgctccaagctcctgggaacctctggctctgcctacggtgggctcctgccccgctccaagctcctgggagcctctggctctgcctgtggtgggctcctgccccgctccaagctcctgggaacctctggctctgcctgtggtgggctcctgccccgctccaagctcctgggagcctctggctctgcctgtggtgggctcctgccccgctccaagctcctgggaacctctggctctgcctacggtgggctcctgccccgctccaagctcctgggaacctctggctctgcctacggtgggctcctgccctgctccaagctcctgggagcctctggctctgcctgtggtgggctcctgccctgctccaagctcctgggaacctctggctctgcctacggtgggctcctgccctgctccaagctcctgggagcctctggctctgcctgtggtgggctcctgccccgctccaagctcctgggagtctctggctctgcctacagtgggctcctgccccgctccaagctcctgggaacctctggctctgcctacggtgggctcctgccccgctccaagctcctgggagcctctggctctgcctgtggtgggctcctgccccgctccaagctcctgggagcctctggctctgcctacggtgggctcctgccccactccaagctcctgggaacctctggctctgcctacggtgggctcctgccctgctccaagctcctgggagcctctggctctgcctgtggtgggctcctgcgctactccaagctcctgggagcctctggctctgcctacggtgggctcctgccctactccaagctcctgggagcctctggctctgcctgtggtgggctcctgccccactccaagctcctgggaacctctggttctgcctatggtgggctcctgccctactccaagctcctgcctcgagtatccttactttgggcagagctcgaacttggagagtcccgggggtggggaacggtgctcccagggcagggcctggtcgaaggccaccatctgtgcgtgctccgaggatgcgcagtggttctcgaaggcctcctgagagtggcaggtgaccaagcaggccgggcagtacagctgggccccagggggctggccaaggggggccgtgcgcccgtcgccatcaggggcagggggtgtgagcaggtccccccgctggaggccacccagctgctcggcctcccacacagccatctccacggcgctgtgtgcaaactggcagcgggactccccacgccagcacggctgcccacgccccacaaacctgcagtaggcaggaggctggccggcccggggccgcggcctcaccaccacaaactgttgcttgcggcggccctcggcgctcacgtgggccaggagggaggggcaggctccgtgctcagggcactgcccctgggggtccacgcgacagatgcatgggggacagcgcctgaagcagagggagcaaagcagctcgaagcggccgccaaactccgtaaggatggcgtcggccgcccggcctgcccctccctgggccccgctgccctgcacctccgccttcagccataggcgctggaggttgtgctgacgctcgaaggtccagaccagggcctcctcgcgactgcgggcaaaggtgcaccggtttcggtggcgccggcagccgagcccagggctgtagtagtggcagacttggtagcacaggggccttgggaaggtgggccggcagcccaccacgcgccagaccttgctcttggtggcctgcttaaagcgggccagcaggatctcgcgggagcagtcatgctccaccctacggaggacgtaggtgctttcattgagccgctgggtgcagcgggagcagcccagacacaggtccaccagggcacacagccgggccagggacggccctctggtggccgcggggctgttgggcagcagggtggaccctggaggcgccacctcgaacaccagcttggctctccagggaggcgtctgaggctcctgagctcacgggtccacgcagtccactggaactgttggccacggttcgaagcctgcgacagaaggagcaggtgagactgaggccagaggacatctggtccaggcccagctcagaagcacggcctctccaccaggcaaggagctggggatctgcctatcctgatgcccaagcagaggcctctccaccaagcaaggagttgggactctccccaccctgacgcccaagtggaggccttggcagtagctgtgtcctgtcagggagtacagggctcactgacccggacacagccagaccctccctcctgaagggtctcaggccccacctagaaggagccaaggtgactgcttgtggagccctggagggggcagagcccttggcacagtgccgcccccaggaggccgcacccctctgccccagccaggggtcctgtgcaccccagggcctcaggctcctgactcttctaaggacacagcacctccttttctattgaatgaccactggcccccaggaaaagaggactccacatctgcacctggggaggggcctcacggagaggagggtacagtgcccaccagagctcagggtgccaggaagagatgggtccccgggtccccaccgcagctgggatgctacaagaagagtaagtttaaaagcaacagactggaggcagacttcagtatgagaacccggcactccccgcggacccctctgagaaaacatccgagtctgccatccagaaaggacgggagccgagaccccaaaatcctgcgctccagtgggtgcagagaccacagcgctgggtcttgctgcggagggtgctggtcctggacgggctgcactgccccgggctgggtctgtggctcccgggactccgcgcccccggctgcactcaccctcccggacccccccctccgcccccggccccgccaccctgggacccccgcgctcaccctcctggagccgcccctggacccccgcgcccccgcccctccgccctgggacccccgcgctcaccctcctggagctgcctgccctgccgagcctgcccaggagctctcagtttcgattctggcccgggcactgacgctgatcgcggaaattacctcaccgccccccgccccgccccgccctgccccgcctccagcgacagctcggcccccgctgcgagggaacctcgggaagcgccagcgagcagaggacgcccctccctgaagggccagcgccgtcgaaggcggaggcggctgggggtgggggtcctttcccgcacccctccagggccccacgccccgtccagcccttcacacaccagagacgccccgatgatgtgccaggcggaaggggtgagaccctgcccggccctggacggcaggatggtctggtgactccaccatcagcccctggagaaatccaggcacagctgacctggaagcctgggtcccctgacaggcaggacctgcccgtggccctggtgctgctgggaccccaagtcccttctgtcaccaaccaggatatggcaggaatggctaagtggccgccgggtcccagagtcagcacgcctggctcttggctctctggactggctctgggccctcagcagccctgtggggaggccccatagaggagctgaggcctccagcccacttgcagctcgagtcccagccccagccttactgccatctcagggagaccccaggcctaaccctcccacctagaccacgcccagctgttagatgtctatgtttaaaataaacgtcccattagccaggggtgggggcgggcgcctgtagtcccagttactcgggaggctgaggcagaagcattgcttgaaccaaggaagtggaggttgcagtgcgccaagattgcgccactgcactccagcctgggcaacagagcaagactccatctcaaaacaaataaataaataaaataaacatctgtgttgttttaagcccctgagctttggggcgatctgttctgcagcagtagataacggacagtgatgctgcccctgaaacaaggaagcaaggctgccacccaaggccagcacctcgtggggagggccaggctgggggctcacagcgacctcgggaggtcggctgggtgggccgtcaaccaccagggagcctctccgcagaccaatcacgttggagctcctgggagagggcaggccctcgacaatagcagccccaggggccgggcgctgagcagggtccatgtgcgtggaacgctgggagaatttgtgtggaacgctgtgttcctggatggagaggctcaacaccacacaaagacgtgagttcctcctaaactaacctgcagtcgcatggtggacacactgactttcaagtccatttggaaaagcatcacatcaccaagaaaggctggacagggctttttttttttttgagactgagtctccttccattgccccggcgggagtgcagtgatgcaatcacagttcactgcagcctcgacctctggctcagacagtcttcccccctcagcctcctgagtcgctgggactacaggcacacaccaccacagtacaggtgcacaccaccacagttaactattttggagttttttctatgtttttcagagatggggtttctcaatgttgcccaggctgctcttgaactcctgggctcaagcaaaccccccacctcggcctccttgagtgccgggattagattacaggcttgaatcccaacacccagcccaggatgatgactaaaaaggattcccagcgggtgctggcatgacttactaaacacataacacactgcaaagccactgaacccggtgtggacacacagttccaaggcagaacagagagtccagaaatagagtcacactcaggagtctggggtgggatgaaagattggctctcggccaggcgcactggctcacgcctgtaatcccagcactttgggaggccaaggtgggcagatcacctgaggtcaggagttcgagaccagcctggccaacatagtgaaaccccatctcttctaaaaatacaaaaaaaaaaaaaaaaaatagctgggcgtggtggcaggtgcctgtagtcccagctactcaggaggctgaggcaggagaatcccttgaacctggggtcggggggggcgaggcggaggttgcagtaagctgagatcacaccattgcactccagcctgggagacggaacgagactctgtctcaaaaaaaaaaaaaaagaaagaaaagaaaagaaaagaaagcttggctctcacacctcagggaaaaacaattcattgatgcattccacaaattattagaacaactgattagcagcatctggaaacaaaaatgggagggacggtctctgcgtagcatcttacaccatatgaaataatcaaacactctcacggaaggaaaagccaaccacagaggcactaggagaaaccagggctgaaagtgtctgattctcaggactcttgggatgtgaaaggcctttctaggtgaaatccagccctgcgccactcgcccccagccaggctcaaggacagggctggtggcttcacacatgccgtgaggggcaagcatacaccccagaaatccacaaaacctgtctcctgaagcactgtttttttcttcttagagaacgaattaaacatctaccagcacaacagtgataaattcaatgacacaaaacaatttcacatggaaaaaaacaccaccatcaaaggagtcaaaaaccaaacatgaacagaaaacaaaattgcagcttatgtcacagtgaaaagtctgatcgctctgatatatatttttttttcttgagacggagtctcactcttgtcacccaggctggagtgcagtggcacaatctcggcaagctccacctcccgggttcacgccattctcctgcctcagtctcccaagtagctgggactacaggcgcccaccaccacgcctggctaattttttgcatttttagtagagacggggtttcaccgtgttagctaggatggtctcgatctcctgacctcgtgatccacccacctcggcctcccaaagtgctgagattacaggcgtgagccaccgcgcctggccctgatctctctaatattttaaagatcttataaattaagaaaaagatgtataatttaaaagaaaaataggcaaaggatgcaaatcaatacttcacaaaacgtggaaagtgaaattgctgtaaatggagtgaagtgttcaacctcggcgtaagggaaacgcaaaccagccccagacaacccgtccacccctctgacattgcaggcactcggccagagtctaaactggcagcaccgctctggaaaccagccaggcccgggagcacaggacacgcgccttccacgtggctccacagaggctcctgcacagagggacatctgtgcccaccaacagctcccggcagctccttctacacccaatggaccgggaatgcccagggcccctcgctcagggtctatgtaatgggcagtctccaccctgtgccatggaagactctaaggccattaaaaatgaggttggccaggcacggtggctcacacctgtgatcccagcaatttggtaggctgaggcgggaggatcacttgagcccaggagttcaagacctcagtaagctgtgatggtgccagtgcactccagcctgggagacagatcaggactgtgcggccaggacaggagggagatgtcctgtttccgcccacctttcacatctgtgcacgtcttcttaactcaaaacaaaaacaaaaagtgccacctcgagtccacagagcattgaaaacctgcaggttgccgtggacagctctctggctcccgtccagctgtgctcaggccacagtgacccctaacacgggctgagtgtgagaccacgggagagagttccacgtacacacagcacacggccaacacgctcacacgggctgagtgtgacaccacgggacagagttccacgtacacacagcacacggccaacaacacgctcacacgggctgagtgtgagaccacgggacagagttccacgtacacacagcacacggccaacaacacgctcacacgggctgagtgtgagaccacgggagagagttccacgtacacacagcacacggccaacaacacgctcacacgggctgagtattagtaatattattgtatccacgtcagcttcctgactttgtaacagacagcttccacgttctgaggaaacacaccttgaagtgatggggtaaagggtgaagggtgaagggtgaaggggtatcgtatctgaaaggtgaaggggtatcgtgtcttagtctcaattgcctggaactacaggcttctacagaaccggcaaatgggccagaacaaagcgactggtgagtccgcatagagcacagggagtcctttgttctatttttgcaacatttgtgtacgtttgtttaaattattatatcaaaatacaaagtaagaaatgtctgcccaacaccctcagcttgtctcatcccggtccctaggtcctcctcacccagcgtccctgccagtgggttccatggccccccagtgccagcctgccgtctgctgccctctgccgtctgccatcacctgaaccctgcaggaaaacgtacacactgtccccagcgtcacgaagcaggtggaggtccccagggcttagggccaggcctcagtttacctgtgactgtgggccatgtgctctcgggcaggaactgacggcctctgggtataactcgcttaagcaggtctttaacacccggttcccatctttccagagaccctcccgggcgccctcccaccagccaaaagctcacacccctagtggaggaggtgatagggtctgcagtgggagggagtggagccgatttcagatctcctcctcttggccttgtgggagccgtgcagccgggaggcctccttcgagatgagcccctggggagaaagtcagggggaccacaccttctccttgcaggggtgccagaaggatctgatgggggtttagtcccaggatgggtctacgccccccggggcctcccagctgctctgtcctctctccctgcctggcctctgcacacacagccatgtgcgtgtgacattgtgaaatatacattaacatatttggtctcgtcccgtttcctggcaaaaacccctaaaatccctggagtagccaaagtggcaagtgcctttttgtgctgatattgaccgaaggctggcagcctggaggcagcctcaggatggggctggtcctcagaaaggcctcagcaggagtagagggtggtacttgcagccttgccccaacctccaggcaggggaggggagaggcggctgaaggcggtcctcaccagtggccagtgacgtaatcaatcatgcctgggtaatgaagcctccatgaagtcgcaaaaggacagggctcagagagccgtggaggttcctggacggggtgcccttgtggggtgaaagctctgcgcccctccccttacgcatctcttcatctgcgtcctttgtaacgtcctttataataaatgggtaaacatgtttccctgagttctgtgagctgctctaggaaattaatctgacccaaatatgggggttaggaacctcaatttatagccaattggtctgaagcacccggggcttgagattggcatggggagtgggcagcagccttgtgtggacatctccaggtagatgaggatgtctaaggacagatggcgtctccagctagatggtgtctccaggtagacaacaacgtctatgaattgacggtgtctccaggttaacaacaatgtctccaggttaacaacaatgtctccaggtagacaacaatgtctatgaattgatggtgtctccaggttgacaacaatgtctatgaattgatggtgtctccaggttgacaacagtgtctccaggtagacaacaatgtctccaggttaacaacaatgtctatgaaaagacggtgtctccaggtagacaacaatgtctatgaattgatggtgtctccaggttgacaacaatgtttccaggttaacaacaatgtctatgaatagacggtgtctccaggttgacaacaatgcctatgaatagatggtgtctccaggttaacaataatgtctccaggtagacaacaacgtctatgaattgatggtgtctccaggttgacaacaatgtctccaggttaacaacaatgtctataaattgatggtgtctccaggttgacaacaatgtctatgaattgatggtgtctccaggttaacaataatgtctccaggttgacaacaatgtctatgaattgatggtgtctccaggttgacaacaatgtctccaggtagatgatggtgtctatgggtggacaatgtctccaggttgatctggaatccctcccactgcagaccctatcacctcctccactcaaggtgtgagcttttggctggtgggagggcgcccgggagggtctctggaaagatgggaactgggtgttaaagacctgcttaagtgagttatacccagaggccgtcagttcctgcccgagagcacatggcccacagtcacaggtaaactgaggcctggccctaagccctggggacctccacctgcactgtgatgctggggagggtgtgtgggttttcccgcagggttcgggtgatagcggacggcacagggcagcagacaatggctccaagtagacgtctctaggtagatggtgtcttcaggtagatggtatcggaattaaactggagcacgcccagccggcgtcggctgcaaaactgactaatctgttgttggaacagaacccccacctggtgtcagcagtgagctgtgctgtgagagtgcaggagaaacagcctagttttctgacatcattagaggtgatgagccaccttctcagcccctgctcacctctcccccacactgaagcctgctggagccctcaggccaggccctgagcaggaggcatggggtaggtgttgcaggatctaaaaggcctcccaggggcaacagagagcctggccaggggctgtgcctttctctgcttgcccccacagcacccccaaagcttgaggcttgatcagatatccctgaggtctcctggcagggaccttcctagtcctcactggcccccagtgtccctctgccatgtggccgcctctccgggatgacagggggaggggccacactcctgctggggctggagatgttggggtctggagtgggtgtgggcctgccctggggctgctctgggcatctggttgacacagagccaggtgcctgtgcgccccgtggggcagctgtgcccagcctggctgccctggaggagggagccaaaacctgggcctttccacccagccttccggtctcccctcttctccctggacatacaggaatgtggcttgctcctgacgcccagaagttcaagtccagaacgttactgcagatgtcgggagagacaagacaggacagaagggagcctgggtcagacccaggtctgcggtctgttggtccccgaagggcctgaggcggggaaaggacagtcttcaacaagtggcagctggaacacggagtaaagtttcgggaaaaacgaagctcagccccacctcgcattgcacacaaaatttaattcaagatggaacatctaagcatcaaagctaaactgtaacgcttctagaagaaaacaggagaaatcttcacaaccttgggataggcatatatttttttcttttcttttcttttttttttttttgagacagtcttgctctgtcgcccaggctggagtgcagtggcgtgattttggctcactgcaagctctgcctcccgggttgatgccattctcctgcctcagcctcccgagtagctgggactacaggcgcccaccaccacgcccagctgattttttgtatttttagtagagacggggtttcaccatgttagccaggatggtcttggtctcctgaccctgacctcgtgatccacccgcctaggcctcccaaagtgctgggactacaggcgtgagctaccgcacccagccggcatatatttctttaaaaagacataaaaggtagaaatataagagaaaaaaattgataaacaaggttatataagtaaaaaatgtctgtaccagtgagaaaaatgaaaagtcaagctattagttgagacaaaaatattcaaaatacacatatctgatgaactatatgcaaactgaaaatgtttttatctttgttattattattatgctttgagacggtcttgctctattgcccaggctggagcgcagaggtgtgatcacagctcactgcagccttgaactccgggctcagacaatcctccgacctcagcgtcccaagtagctgggactccaggcatgcaccaacaccctcagctaattttaaaattttttgtagagatggggtctcactatgttgcccaggctgatcttgaactcctggcctcaagtgatcctcctgcctcggcctcccaaagtgttgggactacaggggtgagccaccactcctagaaggcagattttttttaatctcaaaactcaaaagtccagtttttaaaaacaaacaaaatatttgaacagacactccacacaagaacatatacaaatgaccaaaagcacgtgagaaggtgcttaccatccagtcactgggacacgcaaatgggacccagcgagaaaccacctcacacgggcagaccgactgcgtccagagtgaggacggctcgtgccgcggagggtgcggagcagccaccgctcccgttggtgctggtggggatacaagacggcacagccaccttggaaaacagctcggtcatttccgatacagttaaatgaacatctgtctcaggatccagcagttcgactcctgcaaatctacccaagagaaatgaaaaaaggatcttcattcttcacaacgcctgggccagggagcccctcctgctggggccagcgtgctgacgcccacacagagacacccgccggttcacagcagccccattcccagcagccccagactgaaaacagctccaatgcgtatcaccaggcggctgaataaacaaaccgtggaacgtctgtacgacacaacactactcagacaaaaccaaaaccgaacacgtccgacccacacagaagcatggaggaatctcagaaacagttcagtgaaagaggccaaacacagacgagtattaaatgtgcggttccgtttctatgaagctcaggaacagacgaattctaaaaaccaggtcagtgactgtgaggacaggcccgactagagaagggaacaaggggagtgtcctctgcctggtgcaggcagcaggtacatgtgtctgtattgcttaaaactcatccaaggctgggcgcagtggcctgtcatcccagcactttgagaggctgaggtgggcggatcacttgagggcaggagttcaagaccagcctggccaacatggtgaaaccccatctctactaaaaatacaaaaattagccagacatggtggtgcgtgcctgtagtcccagctactctactcgggaggttgaggcaggagaattgcttgaacccaggaggcagaggttgcagtgagctgagatcgcgccactgcactccagcctggatgacagagcaagactccgtctcaaaaataaataaataaaataggccgggcacggtggctcatgcctgtaatcccagcactttgggaggccaaggcaggcagattgcctgagctcaggagttcaaggccagcctgggcaacatggcaaaaccccatctctactaaaaatacaaaaacttagccaggcatggtggctcaagcctttaatcccagctactcgggggactgaggaaggagaatcgcttgaacctgggaaacaagaggttgcactgagcagaggtcgcaccactgtactccagcctgggtgacaagagcaagactgtctcaaaaacagaaacaaacatgtctaataagggatcattatccaaaatatgaaaagaactcttaaaactcaacaataatgaacaacccgattttttaaacagacaaaagatctgaagagtcacctcaccagagacagagagaaggcaaagcagcagcttgtgaaagggtgcttcccatcacacatcattaggaaatctgcaaacccaaacagtgagttaccatcatacacctgtgagaatgtgccagggccaggcgcagtggctcacgcctgtaatcccaatgctttgggaggccgaggctggaggattgcgttgagtccaggagttcgagaccagcctgggcaacagagtgagaccctgtctccacgaattttttttttttttttagaaggagtctcgctctgtcgcccaggctggagtgcggtggcgtaatctcggctcactgcaatctctgcctccccggtttcacaccattctcctgcctcagcctcctgagcagctgggaccacaggcgcctgcaaccacgcctggctaattttttgtatttttagtagagatggggtttcaccgtgttagccaggatggtctcgatctgacctcgtgatccgcccgcctcagcctcctaaagtgctgggattacaggcgtgagccaccacaaccggcctccatgaacactttttaaaaaaattagccgggcgaggcgtggtggctcacatctgtaatcccagcactttgggaggccgaggcaggtggaccacctgtggtcagaagttcaagaccagcctggccacatggcgaaatccagtctctactaaaaatacaaaaattagccatgcgtggtggcatgcgaccgtaatcccagctacttgggaggatgaggcaggagaatcacttgaacccggggactggaagttgcagtgagcggagatggtgccactgcactctagcctgggcggcagagtgagactcaatcttgaaaaaaataaaaataaaaataaagaatgtcccaaacccaaaacgctgacaacgccaaatgctggtgaggacgtggaacaggaacctcagtcattgcaggtgaggacgtggagcaggaacctcagtcattgcaggtgaggacgtggagcaggaacctcagtcattgcaggtgaggacgtggagcaggaacctcagtcattgcaggtgaggacgtggagcaggaacctcagtcattgcaggtgaggacgtagaggaacaggaacctcagtcattgcaggtgaggacgtagaggaacaggaacctcagtcattgcaggtgaggacgtggagcaacaggaatctcagtcattgcaggtgaggacgtggagcaacaggaatctcagtcattgcgggtgggaatgcgagatggtgctgccactggcggaagacacttcagtagtttcttacaaaatgaaatacattcttaccacacaatctagcagtttcaccccttggtatttacccagatgagttgaaagcttaggtccacacaaaaacttgcacgagggtttttaacagcagctttactcataattgccaaaccttggaagaaaccaagatgtccctcagtcgctgaatggtatactgtggcccatccaaacagtggcatgtcacaaagcactccaccctctgtggggactctgccttctggagtgccctgggctggacaggccacagcccactccccactcctgtgtcctcagctgaggagtggccagtgctgcaccggctcctggggacactcagtgggtacaagacatgaccccttgtaggtttgtatcttgtggcctctgaaaccccatgaagtatcaggaggaggagatatcatggtgggatactgaggggtgcagccccctccaggggcagagggaatgatgggggtgctcaggacgtgtcagcaaatgggaagggtcacagccggaagggtagcaggagggtaggaagggccagaggtgggaaccgggtagttacatcgacctgagagagatggagggggcctggcctcacaagaaggggatgcatcgtggatgtgaggttgcaggaaggtgggctgagcctgtgggcaggtgttggtgctcccctccccgacggggcacgatggggacagagcatgggagggaatatgaagcaggagctctgtcttgtacacatggaatctgaggagctgacagatgacctgtggggagggtggtcccgtgccaatgtgtgctggaaggacatgcctgtgcgtttatcagctctgggctgcagcagggcacaagcgtggaagagcagccatggcagaagggcaggtttcagagtggactcttggaaccagcgccctgtgcccctccagccaccgtcccggagggcacccagtgacccggctttcgatgccattctgccttgagggacgtgtccaactttcctaagtggaaccacgcggcatggactttttttttttttgagacagaatttcactctggtcgcccaggctgaagtgcagtggtgcaatctcggctcactgcaacctctgcctcccaggttcaagcgattctcctgcctcagtctcccgagtagctgggattacaggcacctgccaccacgcccagctaattttgtatttttagtagagatggggtttcaccatgttggccaggctggtctcaagctcctgacctcaggtgatccacccgcctcagcctcccaaagtgctaggatgacaggcgggagccaccacacccagtgaccacacagcgtggacttctatgtctgcctcttgctgggccgtgagtctgggaggctggcctgtggctggtgtgcaggctcctatggccttgggtggaccatggcagcagggaggggaacagcgttggtgacgagaaggctctgggactgaacctgggagaggggaggaaggggcccccctgggcgtgagtctgttgagctcctgactggcgggcgcaggcccctgtgccactgagaggtctccttacctgtgagcggcggtgcctccgacgccagcctcgggtcaaggtggggcccaggctgttcttactattgtcctccagcgatttgcaggacaccttcaaaaccctcacgagttaccgaatcggctgattcaaaaccctcaccaggcaccaaatcggctgatgctcttgatctccgacttgccagcgtgcagaactgcataaatgaacctctgttgcttgcaagccccccagcctgcggtattttgttacagtagcactaacgactaaaacggccatgatcctcccaccaggcctcttgaaaactccgatgcgtgctggggagagaaggacaagggcacagggcacctgctgtgatgaaaacagctttgacctcgggacaccctggaagggtcctgaagcccccaggccacacttggaagaacgaagcatgtgggtgtgagtggtccggggcgggggtggcagccagcgctgtttgcgttgggcgtgtttatagacttgatttctctccacacttcattccaagagatagacactcaaactatgaaaattgtttttattttaaatcaaagtaccaggcagatacttgcaaaacaacatacaaagcaaaactcaaacatggcccttccctagggcgcctctgagcaggcacagagaagttctcaccctctgcaaaatccaatccaatcctatcttctcagaaaaccaaaccaaaggcagccatgaaaacccgtgttctgtacgtggttgagaaggtcctcctctctgagtactggctggccccaaggcgcagaactgggaggtccagggaaccctgcccccgaggagccagcaggacctggaggagccgggggcggtgctgacaacaaccttccccacccactgcagtgtggttcccatgaggatgagggcttctccagggcccttccccacgctggggcttggagcccctgccagaagcagctgggttggcggtagatgtccccgagggccttgggaagcactgggaatgggctcccagccctggtggaatgggggattgggaattaattctgaagctggttgtggcttatttttgtatggctctgaaattaacttcctctccctatgcctcagtagctaaggggcaggggcagaaaaggtcccaaccctgttcttaaaaagaaaggaaatgaacccacaacccactggaagttctgttgacgagggctgtcaaggcagacgcactcgtgactttgacaaagggaagcagctggaaggttgcgggtcccagggtcacaggcagctgtattagtgacaggttctgagctggtgggtgggggccgcagggctctcctgacccccgtagggtcataccgctgcatgctgcagaactcaactagagtggaaatgagtttaaaacggagtatgtacatcaaaagatcaacatcacgccgaaaccagctgactgtgacaacagcaaacaaaaatgtaacagagaaaacaaacaagacacagcctcagtagcttgacatgggtgagggcagccaggacagggccctggtgacaatggcgcagaggtggggtctgggccgctcactggacggacagccagccagttcccttcggagcagtgaagtgggacacaggaccctcgcattgcggggcctcagacgggccttcaactgccgacagaatcagcaggagcgtccaggggaatctggcactcagggtcctcccgggacatgccctgttggagacggcaggaggcctgggctggctgctccctgagatgcctgccccaggaccctggcctggaggggcctcagcctggtcttccttgtgagtccaaggccaggtctcaggacagccacagacagcccttccagacaggctctgggctccaccttcggcagctgccctgagcagcccacccggggcagcctcctgaacacccaggggctctcccttggacagagaccaccaagggccagcccaggggctgcatgggggccgggggccagggagccaagggctgttccgtggccaagcagcccaagctgaagggcccacatgggaatcctcgacctccatagtgactggttctgtttatgcctctgccccaggactgaagccctagggacacacctcatggatctcagacccctgggaggggccggctcagggacaggctgcccaggacctccgcacccggtcaagtgcactcacaggggctcaggggccacccaaagagctaactcgggaagcctaggcactcaccattattttggttgaaaatgctataaatctgactcttcctagaagcctactaagcaattcacttaaaaacaccctcagtacatgtgcaacaatgcctggaccacgcctcgtctgtgcggcccctgggccacctgagcaccggctgggggcgggggaggcaggcacccatcaggatctgcaccccaagctccgggtgcatgttcccaactggaggagaacggggcgccagccacactaaacctacagaaaactgtgggaagaaaccaaatccataggatccagaggtttcacacttgggcttagctcccaagtcatgagttagtaacgtccccagggacctggctgggtgcagacatgggggcctcgtgacctgctgcaccgcgtccagcacctgcagggtcgcgctcggcacctggctctgcttcctctgtctctgctgcacccaggctccccctagcccccgcccacctggctcctgatcaaggcccaatgtgtaaacagtattaataagcaacagatggaaaaatatatttcccaagaaaaaagggggaggaaacgtgggacctgaagaccgattttccaggttgctctcgctgttctgtccccttctctcttctcgtgatttgttttggcgattcctctctttggttctgcagaccacgtgacccacctgcccgagccagccctgcggcctctgcccgctccctgctgccgcggctgagagacagccagccctgtccgtcccaggggcctcgccctcctgtcggctacttccgctcgtggtcctctgccatggcagccacctcaatggtggccgtgtgctcctcaggcccgggggcagcccctgcgggcactgtcacaattgtgctggagccaggcgaggcctgggccacgttctgcagggtggggcccaggccaggcaacgtgagcagctgtagcgggctgaccaccttgaacaccgtgctaccgtcctgcacggcggccgtgctcaggaccgtgaggctggacgcgtccgggtggatctccactgtgctggggtaggtggagccggaagaggccaagactgtgtatcccccgagcagcggggaggccggggagctggcggggggcgcctgaagggaacccttgcccaggacggtggacggcagggtggacaccactttaccaaggggcacgctggtcagctgggggacgggcacgcccgggccaagcgccagctgggcagactgggtgagcacctgcgaggccatggcggccggtcctgatgtggcacgtgcaagccggggccgcttcacaggcggtggcagggagaccggcgtcagcgtcatgagcacgttgctgaggtgctgggacttgtgcttcagctccttggctcggcgacgatgctcatcacactgctgctccagggctgcagggaggtacagatggcatcacacaggggacgggggcatggatggcggcatgcaggggatgggggcagacacgccacaccatctgggtggcccctgggtcagtggcaacccaggtctgctcacctgatgccacaaacccagatgaccacatggccgccaaaggtgaggtctgtgggagacggggcccaagatggccctcggggtagacaccagcctgtgctgacccagggtctgcactgacccggggcctgtgtgcaagcgtggcaatcccgtctcagaccctcctgcactgacccagggcctgcgtgcaagcgtggaaatgccgtctcagatccccgcatgagctttcacacacccagcgtggaaagttgctcttgtgacatattaagagagagaggaggaaaagcagcacatgtggcacatgtgtttaaacataaacatgcacacacacatgcagagtgcacacacacaatgaacacaaacagtgaacacacaaagtgaagagtgaacacacagtgcacacacactgaatacacacacactgaacacagtgaacacacacactgaatacacacacattgaacacacagtgaacacgcagtgaacacacacacactgaacacacacacagtgaacacacagtaagcacagaccccaagaggagcatggaggaaacgcaccaatatcaggggcttgagctctgagcggggtcaggaccagcccttcccattctctgtcattgtttttttttgagacagggtctcgctctgtcacccagactggagtgcagtggtgtgatctcagctccctgcaacttccacctcctgggctcaagcaattgcctgccagcctcccgagtagctgggattacaggcacacaccaccatgcccagttttgttttgtttttttcagcagagatggggtttcaccacgttggccaggctggtctcaaactcctagcctgaagtgatccgcccgcctcggcctcccaaagcgctgggataacaggcgtgagccaccgcgcctggcctctgtcattttctcttaaataactacttggttcatcacagaaatgccggtaaatgtaagcttagtgcaatggagaggtctgactacctcacttaagcttcaggttgttttcctcgcacaacagcagtgcggagaagctcgccgtggtggcggtgactccaggaagtgcaggtggatgcacagccgtggggtgagcccgtgggctccaggtcctcagcctaccgcccaggggacgggacgggggtggtctcagcatacctgccaggtcccgggcgtactgctcccgcgagcggtccatctggcacttgtggctggccagcaccttcttcaccaggtccagcatgccgaagttctgcacgatgttgttgagaagtacagcatcttaaagggtaacgcggacactcagtgagagcccaagcccttcctagagagccacgcggacgctcggtgagagcccgggaccttcctagagagtcacgtggacgctcggtgagagcctgggctcttcctagagagtgagaacaccaccactgaggctgctcctcaggaacccagccagccaggagctcagttcagagggagaagactgagatacatcaaggcgatcctcccaccaagttcagcctcagcacagcaggagtcccaagcctagattcagcctccaacccagcagcacagaagggcctaggggcaggagggccagtggcctcacctcctgcagagactcctgggctgagtagccagcaagagggaagatgcagcttctcacctcgaagctgcaggggagggtcctggacccgctgctgcaggcctctcatggtctccaccagctcctggtggaactcctggatgacctcgtccagcaggccggcgtccttcagcccccgccagaaggtaaatgtgtcatctgtgagggaaggagtgggttcagtgggcagggaaagtgctgctacacggggcagccaccacagccacaaggacatcaccatagccacgaggacaccatgccagagccggcagcgcctggcactgtgctgggcttgcactgcccagacacatccacagtgccaaaatctagcaggtcagcctcagagcgcccacgacaatgctgctggaaccaggcctttctccacaaagaccctgccggccccacctggactcctggagcccctgtgtggcccgaggtgggcagagactccaccaccccgccagggcttgtgagaagcccacaaggaggaacctcgtacctccaatggccgcggtccagtcgccagggtcttcacaggtctctatggtgatggtcgcaggagacccattcactgcagccgaaagggaacctcgggtgagtgctgtttggaccacagtcccacaccccacataccctgtccaccctcctcacaccaccttctgaacctttccatctgtcttcacaaaactgacaaacacaggatacgcactagtacagccaaagtgtacctgccttatattttatggctatttttaatcacagacgttgtcaaacatacaaaggagaaacaacgcagaaacaaatcccttgaacccgtcacccaatttcagcaaatcctcaacactttcctcctcttgtccatttacgattgtactcaacaagcactttcgactggaccgtcaggagcgagacaaggtgatccttctgcttgacttgttttcccaccgagagctctgcggctgcgtctgtcgcccgtggggctcgccctcacctcgcctcttcaagtgatgcttcattgaagtcatcataaatctcagtatctatcatgtttccatttttctacaccagaacaagtggggctttgagagacagaaaccgtcctggctcttcctgtgggtccctctctcgcgcctgcagaacacaactgggcgtgtcgttcatatgtggccattttgggcgttgctgatagagactttatacacagatctggcttaaaaaacaaacccggggccggatgtggtggctcacgcctgtaatccaggcactttgggagactgaggcgggtggatcacctaaggtcaggagttcgagaacagcctgggcaacacggcaaaaccccgtctctactaaaatacaaagtcaaccgggtgtggcggcgtgcgcctgtaatcccagctactcgggaggctgaggcaggagaatcgctagaacccggaaggcagaggttgcagtgagccgagatcaggcccctgcactccagcctgggcgacagagcaggactccttctccaacaccaccaccaacgacctggaagcagttgaatgttttgggaatactggccttttccacattcatcaaagacatggcagtggtgagtatgactcatattacacatctggaattatttggggcgtgaatgagtcgtttttccgagttggggctggcacagcatcttttactaactgcacagtagccaagtcaatggttctcagagattgcaggttaaagaacccaaatcatcttcagaagagctgagcctcagcctagctgtgaggcactgactacagggcgtggaaggcccagttccttccctggcaggcggtcaggcagggccaacactaacgcggtggagccgctggggaggccctggggaggacagacaggaggctgggctctacccagcccctctgaccacagcagcccaagtgtcctgggcttctcaggactcagcactgaacctgccaggctgccccagcaggacgtggaagggggcccaggagaagggtgaggcctccctagtgccctggcctcactctcctacccagcgggacaggacaggactcaactgggtcccacctgggccaacaacaaggacgtccctgggcacacaggaacacaatctggccagcaatgcggagtggcagcttagggacaatgcatgtggcattgctggaaacacatcaccaaagaccacccagagatgtgaccagggagcccaggacctaacttcactttaacttcagtttttttgttttgagatggaatctcacactgtcgcccaggctggagggcagtggagcgatctcagctcactgcaacctccgcctcctgggttcaagcgattctcctgcctcagcctcctgagtagctgggactacaggcatgcaccaccacacccggctaacttctgtacttttaatagagacagggtttcatcctgttggccaggctggcctcaagtgatccacccgcctcggcttcccaaagtgctggggttacaggtgtgagccaccacacccagcctaactgtagttttaagaaaaatttctctattcataaagctggaaagaattctagggaacaacctctccacagtttagagctacagacaccaacgtggaacagtatctaaagcgtcacccaaaaacccaagtggcaggaatacctgcagcaaggcacccagcacggaaggcgggagcacaggcgcgcagttccgtaaaccgccaggtcaggagggaagcgggtccagatttggggctgggccgtgggggtgggagggagggggccgggtgggcgcccaggcactctctgttactcgctatacccttccccacacgtgagttattatattacaaccaaaatggcttaaaaagaaaagtgcttcaatcttccttgtcaatgaaagcagcaattctgccagatctcctctgtgaggcaggaggaggctgatcccagacaactcagggtcccaggcaggagaccggcagtcctggcgtgagcaaacgcctggggccaaggaggccacccaggggcatgtcaccctctgtggccatggccagggtggggctgggtcaggacgagcagccctgtgcacctaccgtcggctgcggcgggcgtgaggggaatgtactcggccgacgtggggctgctcagggacacacgggctcctgagaggtcaatctttgtgctgcggcaggtgttggagcagaccttgtcatgctggtagaagtccagttccccggagtccatgatcttcctgtgacagacagtggcatggagcgtccaggtcggccccagagccgaaggcacctggcccgcccaccctgacctgggccatccacctgcgtggggcaggcctagcagaggcgctggcagctccacagggcagggtgggctctacttccctcttagcgcgagctcggcgtgcaggaccctgctgctgaagaagcagccggcccaggcccacgctacggcactgtccccaggaagggggcaagcgctggccagtgggtgtcctggaggtgcccgtcagagtctgtggggctgggcctttctgggatgtcccactaccccagccccaagggagtgacccacagctaacaaaggtgggcccagtccacctgcatcatgcgtgactcattctgaagcagaggaaggtgggaaatcacttccaggagaaccttcctccttctaaaggcacagagacagccaagaagagtgatgagggcgcaggacagcaccaacggccatggctgccgctcatcctcatctttaccaggaaggcttcgtacggcccaaactgctgagagccgccctcccagggccctctcttctgcctctccggaggtccagggtctcagtcctgtgtgtctcaacgagcctgcctcgacccatgaaacgagggtcagaggctccagcctcattcaatctttgggcagcactgacctcaggcacacacaggctaatgcttctgtggtcagctcaggacttgcctacctggccggtggtccccacagctgtgccaccagccacgttccagaaaatcagaggccagttcagctggacagggaaaggacctgagccatgggaaaggacccagggctagtcactcgtgaggtctcaaactctgactccagcacaaagcaggggccctccttgggaagcaaggtagaggccaggcccacaaagactgagactgaggcttatgattcacagataagtgaaggccgggcacggtggctcatgcctggaatcccagcactttgggaggctgaggcaggtcaatcacctgaggtcaagtgttcgagaccagcctggacaatatggcaaaatcccgtctctactaaaaatacaaaaattagccgggtgtgctggcgagcacctgtaaacccagctactggggagggtgaggaagagaatcgcttgaacccaggaggcagagttcgcagtgagccaagatcatgccactgcactccagcctgggcaacagagcaagactccctctcaaaaaaaaagtgaaagaaaggacagaaataaggagtaacataaaaggccaaaatctgatgcacaaataccagattatacctttcttttattttttattttcagaatgcataattggaacagacccttttcttttcctttttattcttgtttttttttttttttgagacagagtctcactctgtaacccaagctgtattgcagtggcacaatcacagctcactgcagccttgacttccaggctccagtgatccttccaccttagcctctcgagcagctgggaccacaggcatatgtcaccaaatccagataattttttttttatttttagtagagatgaggtctcattattgtgcccaggctggtctcaaactcttggcgtcaagtgatcctcctgcctcagcctcctaaagtgttgggattgcaggtgtgagccatgtgcccagccaaccctttattttacaacgctgaaacagtcacaagtgccttcaggtaaagaattggtggaaattaaaatgactgacaaaacaattctaaaaatctgatagtgtccctgttggcaggagtgtgggagacgggtttacagttttgggtgtgagcaggtgcagcagccacccgggaggttgtcagcactcaccacatctaaaatacgcctcatcttcaaaatcccaaaaccccacaagaaagcaagagctgccagggccccttccagcagggaggctgaccctgcgccagcgcccacctgagcatgatgccgttcatgcggatggctctcttccagtccttcagggtggacttcccggccaggtgcacaaattcctttgggctgattacatgctcgtcgtactgtgggggacacagtcatgtgggtcaagcttggccgggacaccacatagggtgcccccatctcccatccgaccctgagtcaggcgcgcaaggcaggaaaagcgccacggcacggctctgaccggtgcaggcctcctacagagcattcaggtaaaacaaggacatgacccacaggcacggtggctgcagtggggagtggtgtctcctccagccctgagggggcagagctgctgtgtgcctggggctagacagggctgggctgaccacaccaggtagaaggtgtgtggccttctcttcctccaggcagactaagcaaactgcttctgtgcaatgtattttataaatacacgttattgcatacgttacatcgcagatggcaacagatgccagcacatgggtggagctgtgaacgccaccttcctcaggtccctcctgacaccaccttgccccgtgcagcaaacaccggcacctgctctcactctgacacacacacacacacacacacacacacactcatctgtttctaagccaggggaaccctcctgcttgctaatttcacccatgtgggagctcagagaaactgagaaggtaaaatatcctgttcaatcttgttacacaagcaattattgaaaccaaaaactggaataaaactgcatttacttagaaaacaagcaggctggggatggaggagtcacgaggtctctgcagctggacccaggaggcccgagtacgggggccgcctccacccccgggccgtgcccaagtctagcttgctgaaggaagtgatgttcccaatccctgagcccaccctctcatgacccctgtgccacagacgggaacactaagcccagccagtctctggctctccctcatgcggctgatcagggagatcccatagaagtccagaaggtggaatccagaagattctctggccactgtcggagcctggcaggaaggctgcactggctgtgactgaggctgcttccggccatcacttctacccaacgtggctcacacctaggaaactcaactgcacccaaagggcctgatcctacctagggctctgggctcagccagcctcacctccctgcccctcctaggcctgcctctttcctttcttgctttcacctttgttactcttctcaccccaggttttcctctcccagctaggaagctacatgctgtactctcatgagtggctccaggagcttcagcatgtcacgcttaccagagctgccagagcccagagctaacgcggccactcctgaccccccagagctaacgcagccgctcctgaccctccagcgctaacgcggcccgctcctgaccccccggagctaacgtggccgctcctgaccccccggagctaactcggcccgctcctgaccctccagaccacagccacgtggccctgctctcatctctgaggccctccagggcgtctctctcgatgctgaatagacaggactggtcgggtgacccacgtttccccgactcttcacacctcctcacagcacagcgcttccatctggaggcctcctatctccgcctgcaatgcatatttagaacatccttccatcatgatctgctggtggcaaactcgtgtctttttctggaaacgtctttcttccagcataatttcaaagacgacctcacggtgtcgtcactcgccacacagtgaggctctggcgctgccacctctgctcctgcgctgctttcgggagctcacggccggcgggattcttgctactgagcgatccgtctctcctcctggctagactgaggatcttctctgtccccgtccttctggaatttcattatgatgtcacctatggtacatttctttcgtgtttccaacttctaattctaatacaatttcaaactcacagggtaattgccaggatagtccagggagctctcacacgtgcgttccggactcactgcctgctcccgtctgcccccttgcccccgcctagacctgtgcacgtgcagctactgagagtgaagcagagacgtcgggcccctgggccctcaacacttgtgtatatttcctaagaacaagcttctcttacgcagccacagaacaactcgcatcaggaaattatcattcatacattattctctaatccattgtccatagtcaaattcatgaattgttccaatgatagcctttattgcaaaaaaaaaatttttttttttgagatggagtctcactctgtcgtccaggctggagtgcactggtgcaatcttgggctcactgcaacctccgcctcccgggttcaagagattctcttgcctcagcctcccgagtagctgggagtacaggcacatgccaccatgcctggccaatttttttgtatttgtcgcagagatggggtttcaccatgttggctgcgctggtctcgaactcctgacctcaggtgattcacccgcctcggcctcccaaagtgctgggattacaggcgtgagtcaccatgcccagcctacatttttttctgatgcaggatccagcccaagactgtggagcatgcagctgccttgctcttcggcttttgtccccattaagactgcagcaggccgggcgcggtggctcacgcctgtaatcccagcactttgggaggccaaggcgggcaggtcacctgaggtcaggagttcgggctcagcctggccaacatggcaaaaccccatctctactaaaaatacaaaaatcagccaggcatggtggtgggtgcccgtagtcccagctactcaggaggctgaggcaagagaatcacttgaacccaggaagcggaggttgcggtgagccaagatcgcgccattgcactccagtctgggcaacagaggaagactccatctcaaaaaaaaaaaaaaaaaaaaaagacggagcagcttctcagcctgtctgtgtttttcttcaccttgacgtttttggagcttgtgggtcaggtattaacgtaggctgtctctccatgagtgtctgctgttttctcatgagtagagtcaggctatgaactgttggaagaacaccacagacctgctcactgcatcaggaggctcaaaggggaggtctgtcccgagcctgatgatgtgaagatggatcgctgggttaaggaggcacctgccagctttcccaccacagctacgacttacgtctgcaatggctgcatggtttacagggatgctctgaaactagtctgagcacccgctcatgactctgaccccatcattcctcccatgctttacttctctctatgcatttatttaacataaataaataacatgaaatatatggagataggtatatagactcatagattttattttactcgagtgatgacccatgactatcactatttatttggatgctaaaagccaccctacatgcaggcagtggggtcttcatccaggctggggtcagtcagggcccttgcactgtggaccactctttctcagttatgaaagttctcagactctctctcctccttccagaactcaaatagatgtgtttgactctcgtgcttcctgaataaattgctttatttctatttacaagtcctacttctctcttcagctatggctaatctgctgaagacctatccactaagtgttgaacttcaatcctatctctagtcgtgtttctgcagaatctacttatgctttactcatgctctcttttcttttttttttttttaagaagaaactggggtctcagtatgttacccaggctgctcttgaactcctgggctcaagcaatcctcctgcctcggcctcccaaagtgtcaggattgcaggtgttaagccatggcacccggcctcttttatttcttaaaataaattattaaatataacgattttatcttctaagccttaaaaccccaacagccgaggctgctgcagggccgactctgcagcctgtggcttctgtggggcctgtggcttctgtggggcctgtggcttctgtgctgcctgtggcttccgtggggcctgtggcttccgtggggcctgtggcttccgtgctgcctgtggcttccgtggggcctgtggcttccgtggggcctgtggcttctgtgctgcctgtggcttctgtggggcctgtggcttctgtgctgcctgtggcttctgtggggcctgtggcttctgtgcagcttgtggcttctgtggggcctgtggcttctgtgcagcctgtggcttctgtggcttctgctccaggagcactacttcttgtgtgtccagggttctgtggaaattacttgaaacctgagataaaggtgaattcttccaaaaagtactttttgtttgtttctgtcagattcctgggggaactgccagctgggagccactgataacgacactctcagcttgaggctttcagaccatccagaccacctatgaatcctcaagggggtgtctccttccctctgccagggacaagaggtatgggagtacgtggtggattcacccttggaggtgccagctttggaagggacagtcaccacccagcacgcacacctcaaggaagccctgggctttgtcttctgatctccagccctgcaaggctgggaaaaccaagctcaggccaaggctctcagggcaaaagctgggcttggcaccccatctgcctctcaattctgtcaccattaggtccccaggcctcagcacttcctctttcttagcccgtgtgaggcagcatctgtaagatgctttatggaaatgtcttcactggcattttcggctgttccaccacaggtgagcctgggcacctgacctatcagtattgtcagaaagagaagacctttcccactcatcctaatccttaccaaagaggcagcctttttggagcagctctcactggatctgctgggtaaagctccttgtccaggaggggcagcctcctccacacagcgggagggcctcccagcctccctgccacagtgcactgtggccacagcgaattcctcttcctgaaggttcttcccgcacctccttcactctccccagccctggagaccctgcctcaggatgcactcagcacagctgcacccccaaagcagtcacagacaccatgaggcctctctcctgggccctgaatgcagcctgtgctcacctgaacacatttcacattgatgccgggacacacaaacttcctccagatgaggttggctctgctgtctccacaggtgatggggtacacaatctcagcttccaggttctccccctcttcagccatcttcacttctcacaggcacattgacagggaagggtaaaagcagaacatcagttacaacctcttcaaagcatttcctgaaaatgcagaaaatagctaccaacatggaaaccaaaaattaaaatccaggaaggcctgagatagagccaaggtgggcagggcatgcccatcagtgccattagagtttcagggttaaacccactaaacagatttaaatatcgttacattaacagaattccattaaactatggttcaactgaagacccacttaggaaaataaaatcaaactttaattgaaacaattctagggaaacctaaggttttaaaggttctagggcctttaatctcaggcaaaagaaaaatattaagagtgttataaagaatttttgtaatcccagcactttgggaggccgaggcaggcggatcacgaagtcaagagatcaagaccatcctggccaacatggtgaaaccccgtctctactaaaaatacaaaaattagccaggcatggtggcgggcacctgtagtcccagctactgggaaggctgaggcaggaggctgaggcaggagaatggcatgaacccgggaggtggaggttgcagtgagtcgagatcgcgccaccgcactccagcctgggtgacagagcaagactccctctcaaaaaaagaaaaaaaaagaatttttactgggccaggcgaggtggctcacacctgtaatcccagcactttgggaggcccaggtgggtggatcacctgaggtcaggagtttgacaccagcctggcccaacatggcaaaaccccatctctactaaaaatacaaaaattagctgggcatggtggcatgtgcttgtaatctcagctacttgggaggctgaggcaggagaagtgcttgaacctgcagggcagaagttgcagtgagctgagatcatgccatcacactctagcctgggcgacagagtgagactccgtctcaaaaaaaaaaaaaaaaacagaatttttactggccaggctcagtggctcacacctgtaatcccaacactttgggaggctgaggctggaggatcacatgaggccaggagttcgagaccagcctgggcaacagtgggaccctatttcttgaaaaaaaaaaaaaaaaaaagttttttaattagctgggtatggtggcacatgcctgtagtcccagctactcaggaggctgaggtaggaggatcatctgagcctgggaggttaaggctatggtgaacggtgatcgtgccactgcactctagcctgggcaacagaacaagaccctgtctcaaaaaacaaaaccttcttttactaccattcactgatcgttataataaacagacacaggcaaaacaagagtactgaaacagtgagaagaaaacaaaatccaaaagaggagagagctgcaaacttggggccaggtgactttgctctcctattagtcatgggcagagaaagggctgtcattacagacacatggcaggttccacctgggggacctggggcctggcctctcactcctaagggcacacagcttgggaatcagcccgaacaaagaccttgtatatctctggctgttcctcattttgagtgcaggactgtcctgtccctgctgcggcaagaaggcagacttcccacctaggacggcttcctacctaacacggcttccttgagctgggaggaggctgtgaaggccgcggcagctgctgccgctgcattttctgtctccatgttatcttccgtcaggtcgcccctggtgaagtgaagggaggagagaatagaatcaggatcccggagggcacaacctgcagggcactattttcctgacagcgctttgctgacctgttacactcttctaactgaattcagaaatggcagaggggccgggtgcggtggctcaagcctgtaatcccagcactttgggaggctgaggtgggagggtcacttgaggtcaggagttcgagaccagcctggccaacacggtgaaaccccatctctatttaaaaaaatacaaaaattacctggacatggtggtacatgcctgtagaagttggggtaggagaaccgcttgaacctgggaggcagagattgcagtgagccaagatcacaccactgcactccagcctgggtgagagagcgagactctgtctcaaaaaacaaaaaggccaggtgcggtggctcatgcctataatcccagcagtttgggaggccgaggcaggtgaatcacctgaggtcagaagtttgagatcagcctggccaacatggtaaaacctcgtctttactaaaaatacaaaaattagctgggtgtggtggctcgagcccgtaatcccagctactcaggaggctgagaccacagaatcacttgaacccgagaggtgtgagtggggattgtgtcaccgcactccagcctgggcgacagagcaagatgccgtcaaaattaaaaaaaaaaaaaaaaaagaaatggcagaggctgcgcaggtctgagcactgatggggacaagctggtctcgagatcacacattttctgtttggttcatggtggcgagcacccagaacggcacccagcaggtaaagccagcaggtgaggctgggtgcagtggctcacgcctgtaatcccagtactttgggaggctgaggcgggcagatcacttgaggtcaggagttcgagaccagcctggccaacatggtgaaacctcatctctaaccaaaataaaaaaattagccaggcgtggtggtacacacctgtaatcccagctacttgggaggccaagacaggagaatcgcctgaaccccggaaacagaggttgcagtgagccgagattgtaccactgcattccagcctgggcaacagagcaagactctgtctcaggggaaaaaaaaaacccagcaggtgaaaccagcaggattcatggaggcagcgagtgccccagcaaggattctatgcttccatttctgtctttaataaagtgttttatttccacaataattacttcatatggctatagaaactatcagaaaatacaaaattttagaagaaaagtcactatggcccaacctcataaaaaactaaattgtagacaaaagggtaaaagatgaaaccataaaagtattagaaggaaaaaaataagttttttttacttgtttcaaagtgacaaagggttttctcatacaatacaaaaccaagaaataaaaaaagataactttgccttaaaaaataaaaataaaaactttcaatgccaggaaaaaaaacaccacaaacaatttttttttttttttttgagacggagtctcgctctgtcgctcaggctggagtgcagtggcgcaatccccgcccactgcaagctctgccttccgggttcacaccattctcctgcctcagcctcccgagtagctgggactacaggcgcccgccaccatgcctggctaattttttgtatttttgttagagacagggtttcactgtgttaaccaggatggtctcgatctcctgacctcgtgatcctcccacctcggcctaccaaagtgctgggattacaggcatgagccactgcgcccagccaccacaaacaattttttaagaaaagaaagaacttggtggcaaaatgcttaaaacataaggacaacaaaccacttatttcctgatatgacataaagaggtcccaccattgcactccagaccaatgtcacaacacaacagggaaacgcaaaggccccaagcaggggctctggagaaaccctggaaagacactcatgacaaatgcaaacagaaaccagtacatgaggccactttcccctagagagcccacaggaaggaaccagcgttaccacgcgtacgggagagtcttgggatggtggtgccggcccaggacgcaggactccaatggagtcgttggtgagagctatgaggagggcactccgcctgcagcctagaaacatgcccctctgacccacctccatttctagaaacatgcccctctgacccacctccatttctagaaacatgcccctctaacccacctccatttctagaaacatgcacatatgacccacaagtccatttctagaaacatgcccctttgacccacctccatttccagaaacatgcccctctgacccacctccatttctagaaacatgcccctctgacccacctccatttctagaaacatgcccctctgaccccacatccatttctagaaacatgcccctctgacccacacctccatttctagaaacatgcccctctgacctcacctccatttctagaaacatgtccctctgacccacctccatttctagaaacatgcccctgtgaccccacatccatttctagaaacatgcccctgaccccacctccatttctagaaacatgcccctgtgacctcacctccatttctagaaacatgcccctctgacccacacatccatttctagaaacatgcccctctgaccccacctccatttctagaaacatgcccctctgaccccacctccatttctagaaacatgcccctctgacccacacatccatttctagaaacatgcccctctgaccccacatccatttctagaaacatgcccctctgacccacacctccatttctagaaacatgcccctgtgaccccacctccatttctagaaacatgcccctctgaccccacatccatttctagaaacatgcccctctgaccccacatccatttctagaaacatgcccctctgacccacacctccatttctagaaacatgcccctctgaccccacctccatttctagaaacatgcccctgtgacctcacctccatttctagaaacatgcccctctgacctcacctccatttctagaaacatgcccctctgacccacacctccatttctagaaacatgcccctgtgacctcacctccatttctagaaacatgcccctctgaccccacatccatttctagaaacatgcccctctgaccccacatccatttctagaaacatgcccctctgacctcacctccatttctagaaacatgcccgtgaccccacatccatttctagaaacatgcccctctgaccccacatccatttctagaaacatgcccctgtgacctcacctccatttctagaaacatgcccctctgacctcacctccatttctagaaacatgcccctctgacccacacctccatttctagaaacatgcccctgtgacctcacctccatttctagaaacatgcccctctgaccccacatccatttctagaaacatgcccctctgaccccacatccatttctagaaacatgcccctctgacctcacctccatttctagaaacatgcccgtgaccccacatccatttctagaaacatgtccctctgaccccacatccatttctagaaacatgcccctctgaccccacctccatttctagaaacatgtccctctgaccccacatccatttctagaaacatgcccctctgaccccacctccatttctagaaacatgtccctctgaccccacatccatttctagaaacatgcccctctgacctcacctccatttctagaaacatgcccctgtgaccccacctccatttctagaaacatgtccctctgaccccacatccatttctagaaacatgcccctctgaccccacctccatttctagaaacatgtccctctgaccccacatccatttctagaaacatgcccctctgaccccacctccatttctagaaacatgcccctctgacccacacctccatttctagaaacatgcccctctgaccccacatccatttctagaaacatgcccctctgacctcacctccatttctagaaacatgcccctgtgaccccacctccatttctagaaacatgcccctctgactcacctccatttctagaaacatgcccctctgacccacacctccatttctagaaacatgtccctctgacccacacctccatttctagaaacatgcccctgaccccacacctccatttctagaaacatgcccctctgacccacctccatttccagaaacatgcccctctgaccccacacatccatttctagaaacatgtccctctgactcacctccatttctagaaacatgccactctgaccccacacatccatttctagaaacatgcccctctgacccacctccatttccagaaacatgcccctctgaccccacacatccatttctagaaacatgtccctctgactcacctccatttctagaaacatgccactctgaccccacacatccatttctagaaacatgcccctctgacctcacctccatttctagaaacatgcccctctgaccccacctccatttctagaaacatgcccctctcaccccacatccatttctagaaacatgtccctctgaccccacatccatttctagaaacatgcccctctgaccccacctccatttctagaaacatgcccctctgacctcacctccatttctagaaacatgcccctctgacccacctccatttctagaaacatgcccctctcaccccacatccatttctagaaacatgcccctctgacccacctccatttctagaaacatgcccctctgacccacctccatttctagaaacatgcccctctgacccacacctccatttctagaaacatgtccctctgaccccacctccatttctagaaacatgcccctctgaccccacctccatttctagaaacatgcccctctgacccacacctccatttctagaaacatgcccctctgacctcacctccatttctagaaacatgcccctctgacccacacatccatttctagaaacatgcccctctgaccccacctccatttctagaaacatgcccctctgaccccacctccatttctagaaacatgcccctctgactccacctccatttctagaaattaatcctgcagacatggtgttcccacactggcatgagggttgtctgaaacagggaacaagtctccagtttctggaacccgtgcgggcagctgcctctggggagatgatgtggagaagctgggagaggtctgggtggggttcccagctgtgcacctcataacagccaactgtatgatgtgtgcacttctaaacttccagaagtttgcttaaaaacacacgcacaccagccgggcacggtggctcacacctgtaatcccagcactttgggaggccgaggcaggcggatcacaaggtcaggagatcgagaccatcctggctaacacggtgaaaccccgtctctactaaaaatacaaaaaattagccgggcgtggtggcgggcgcctgtaggcccagctactcaggaggctgaggcaagagaatggcgtgaacccgggaggtggaggttacagtgagccgagatcgcgccattgcactccagtctgggcgacagagtgagaatctgtctcaaaaaaagaaaacaaaacaaaaaaaacatgtagcaagaggaagtctcaatttccagatggtagaagaacagatttaattccccacaaaaaagaagaggatctttaagtccttcaagacagccctgcctcagctgccacgtggggttctcttctcagagaagaaggcgcatgcagactctccactgctccataagccactgtcccgcgagggcagagccttggcgtcctggcaaagcaactgcagactgaaaaatgccctctggtccttcatggctccctccatcaagacagggggctatttcccaccccctccacttgactttgggccaagctttgaagagctttgaccaagaggctgtgacgaggccctacgaggactctggctctcctcctgctaagcacacccaggcaggtgtcctggcagatgaggaccacatgcagagcctcggccagcccaccaatgcccggatatgcaagtgagcccagcctggaccccccggcgaggcccagcagcaccagcccaggcccgaaaaccttaagaaatgaccagtgtctgctgctttaagccaccaagctctgcggtggtttgttaggctgcaagcatggctaattcagaaactgccagaaacaagcactgctgtccccagcctgggacacacagcaccgcctctgcgtggggagagggcacaggctaagggcacaaatgccatcccagacccggctcttgtgtgtggaaggggccactgtgccatgaggcagaggaaaccttggcaggaccttatgccacagcaatttaaaagagaagaaacaggctgggcgtggtggctcatgcctataatcccagcactttgggaggccaaggtggtggatcacttgaggtcaggagttcaagaccagcctggccaatatggtgaaaccctgtctctacgaaaaatacaaaatttaggcaggcgtggtggcgggtgcctgtaatccctgctattcaggaggctgaggcaagagatttacttgaacccgggaggtggaggctgctgcagtgagctgagatcatgccactgcactccagcctgtgtgacggagtgagacttggtctcaaaaaaaaaaaaggaaacacatctgactagtgtgatctcgcaaggaacattccagacacagtggagctagaaggttcttctccaaacaaggaatccccaggggatcaaattgttttgcatcggccagacatggtggctcaagcctgtaaccccagtgcttcgggaggctgaggtgggaggactgcttgagtccaggagttcaagactagcttgggcaacacagtgagagcccattagccaggcgtggtggcacatgcctgcagtcccagcactgtactaaaaatctacacggggccgggcatggtggcacatgcctgtagagtcccagctactcaggaggctgaggcaggacgattccttgaacccaggaggtcacggctgccatgagccgtgactgtgccactgcactccagtctgtgcaacagaacgagactctgtttcgaaaaacaaaaaatcatttcatgtctccagtttctccactggcaaaagactctgtcaaggtaaaaaatggttctgacccacagaaatctaagaaaggaaaaaatataaaaaatagaaaatttaaaaaagagatggtctcagaataaagaccaacctgggctatggttgtcactcttccctcacaccttagaaagctttctggccgcatctggccaaagggccaccctgccccatcttggatcagtgaggtgccttcgaacaagccacctgccctggagcccgtcctgtcttgtctgccaccgcacgctcagtaggggaggggaagtcgctaggttttagttcaccagtctctggatcaagacgtgccataaccaagaagccccagccacacccagacccgacgtggccacaaggggtgagctgggaaggcccaggaaaaggcgggaggcggacgaatggaaatgtcattctgtggccacagaaatgatctcaacgttttgtaacttcctaccaagaggcagtcttagctctgcccttgaaccagcacttggtgatgtcgcttgcgtcaatcaaggcaacagaagtgagcaggaggcccactttcctctgcaactgtgggcttacggggcaaagaagtccaggcctccaggtggaggatcacagaccgggcaaagcagaggagagccacccagccgagcctacctgtgcctcagactgcctccctccagagacccctgtggccaaggccacccagaccagcaggtccttgccaagctgtcagctgacgacaggggttggtgaggccggcccagaccagcagaaccacgaaccaaccaacagaattaaaaataataacaactatgtcttgtcttaagccactaagttttggatggtttctttctttctttttctttttttttttcggagacgcagtctcactctgttgcccaggctggagtgcagtggcgcaatcttggctcactgcaagctctgccccccggattcacgccattcccctgcctcagcctcctgagtaactgggactacaggtgcctgccattgggtgttttcttaaacagcaaaagaaaactgacacaatcataaacagagcaagcaagagaacttggcaattatttcctctctacttctcactgttcttcaaagagttaactcaagcataagatgtgagcaaattcttttaacatcctagaaaaaaagctcctactcagtgttcataaagcaaagctaacctacaggagccaccttccacagtgaccacaggaaaccaagacagcaagtgggacaccagcctccagggcactgcgccagccgtgcgcctgtgtctgccactgccctggtccgtcactgccaccagccggcaagacacccacagaggagagctctaagccacaactgtgtacgaagacaactgtgcaggattttattactacaacatttttgttttcttttttttttttttttgagactgagtctcgctctgtcacccaggctggagtgcagtggcacaatctcggctcactgtaacctccatctccctggttcaagcaattctcctgctgcagcctcccaactggattacaggcgcccgccaccacgcctggctaatttttgtacttttagtagagacggggtttcaccatgttggccagactggtctcaaattcctgacaagtgatccacccaccctggcctcccaaagtgctgggattacaggtgtgagccactgcgcctggcccatttttgtttatcaataaaaatgtacttaatgttgaactctccacatttcaaatgggtaactccagtgtccttgatgctcctgcgacatgttcgtgagacttctcttgggtgtgagagtctagcatgtgggtggtctggacaggagggggagggaagagtgcagagcagggcagggtaaagagaccccctaggatgtgaaggccgccctgcatttgtcagactgggcaacacccactccatcagatggaccctggtatgggcggcaagccacctaggtgccgaggcaagagaccgagggcacgagctgttccggtgtaataaaatgcataaaataagaatagttatactagatatagatcataaatatgattatatatgaatatcattcatcattagtttgtagcaattactctttattccaatattataataatccttgcctaagcataacctaggaaaaactaggaaatcataacctaggaaaaactaggccatacagagataggagctgaggggacatagtgagaactgaccagaagacaagagtgcgagccttctgttatgcctggacagggccaccagagggctccttggtctagcggtaacgccagcatctgggaagacgcccgttgccaagtggaccgtggtctagcggtagcctcagtgtcaaggaaaaacacccgctacttagcaaaccaggaaagagagtctccctttccccgggggagtttagagaagactctactcctccacctcttgcggagggcctgacatcagtcaggcccgcccgcagttatccggaggcctaaccgtctccctgtgatgctgtgcttcagtggtcacgctcctagtccgccttcatgttccatcctgtgcacctggctctgccttctagatagcagcagcaaattagtgaaagtactgaaagtctctgataagcagaaataatggcgtaagcggtctctctctctctctcctctctctctgcctcagctgccaggaagggaagggccccctggccagtgggcacgtgacccacatgaccttacctatcactggacatggttcacactccttaccctgccgctttgtcttgtatccaataaatagcgcaacctggcattcggggccgctaccagtctccgcgtcttggtggtagtggtcccccaggcccagctgtctttttcttttatctttgtcttgtgtctttatttctacactctctcatctccgcatacgaggagaaaacccaccaaccctgtggggctggtccctacaccctggctttgtagactggagcctaggcacgactcagctgctgtagtgaattgcgatcctccaaacccagcaaggcacctgcaggacatctggcccagtctcctcgttgagccagttcacgaaaaagagacttttctgagtgacatgctaatgggcaatatgaggactaaatgggatggtctccaacttggacaaaccaacagtaaaagccactttgcggggaaagaaacttttccttttttcttttttttgagacaggatctcaccctgtcacccaggctgcagtgcagtggcatgaccttggctcactgcagcctcaacctctctcaggctcaagcaatcctcccgcctcaacctcccatgcagctgggaccataggtgcatgccaccacacccaaataatttttatattttttgtagagacgaggtttcactatgttgctcgggctggtctcaactcctgggctcaagcaaccctcccacctcagcctcccaaagtgctcagattacaggcaggagccaccaggcctggccaacataggaagaaatttaaatttgaattgaatattagaagagatgaaaattcatcaacatggaaagacaaagatcattaactaaagccaaaccagaatggaagctgtgtgtacagtggggtctcatgctgggaacgcgaggggcacgtgcagggctccacggtgtggcgacgccccatgctccctttgtgggggttcatccagcggaacatgaggacctggggtgcttttcaacatgtacgtgagtttaataataaaaaggtttaaggaaagaaaaattcatatgtttcgatataaacagaacatctggaaagatctattctaaggtgttgacagtaggaatctctaggtagtagtaatatggcctttttgaatttttgcttatcagtattttctaattttctttttctttctaaataattctagctatgaaataattttctaccatatatattttgtaataaaaatggttatatttaattttttaaaggctgtacaaacttcctgataaaatggcaaattagacacacacatgtgggccgggtacagtggctcgcgcctgtaattccagcactttgggaggctgaggcaggcagatcacctaaggtcaggagtttgagaccagcctggccaacatggtgaaaccccgtctctactaaatatacaaaaatgagctggatgtggtggcacacacctatagtgccagctacttgggaagctgaggcaggaaaattgcttcaacccgggaggcagaggttgtagtgagccgagatcatgccactgcactccagcctaggcaacaagagcgagactccaactcaaaaaaaaataaaaataacacacacgtgaataggctcctcatggaagtcatcacaacaatgcagagggaagagcttccaaagtgtaaacccagaagcgaggagcaggagggtgcgcgcagacgcagagagcagcaaggtgcagactgagaggcggaggctggccgtggggagatgactgatgctcagtttataccccaaatccgtaaatctagaggcgtggcacatcaactacctctgccagcaggaatgagggaaaggagggcaaccaaaagatgtcccaccctcacccatccagctacctgccatcctcagccccactggcagaagaccctgagaggtggaggcaggcccctgcctacaggaccctgagagctaggggaaggcgttatcctgaactgtgtcccccgtaaaattcatatgttgaaggcctcatccccagtgtgactgtatttaaagatggggtcttcaggagataatttaaatgaggtcatataagttggccctcatccagtaagactttgaccttctggtggtttttttttttttggagactgggtctcactctatcactcaggttggagtacagtggcacgatcacggctcactgctgtctccaactcctgggctcaggtgatcctcctgcttcagcctcctgagtagctgggactacaggtgcttaccaccgcacccagctggtggtgcattgtgttttttgtagagatggggttttgccatgtcgcccaggctggtcctgaactgggctcaagtgatctgtctccctcggcctcctgcagtgctggaattacaggtatgagccaccgcgcctggccgaccgtgaccttctaagaagtgaaagagaaagatctttctctctccctccctctccatcatgaggacacagcaagaagtcggccatctgcaaggtagaaagcgagtcctcccaacagctgaacctggcagaccctgatcttggacttcagccttcagagctgtaagaaaataactctctgctgttcaggccacgcggtctacggcagcccgagcagactaagacacacgccatctggggagtcagaccagatcaggaagaaaggcctagagctcaggatactgaaggtcccaacccggtgctggaccagaccaccccggcagccgcggccacggagtcacggctcgggtgaggtgacctggacaccatcccggcagccgcggccacggagtcacggctcgggtgaggtgacctggacaccatcccggcagccgcggccacggtgtcacggctcggatgagatgactcggacaccaccccggcagccgcggccacggtgtcagggctcaggtgaggagagttggatatgggactgggcctaccccgaggctgcttccacccagacgcctgggtgggtgacacgaaagctgggctcagttgggatcagagcagcctctccccaggtcagaaatgaccctgggctcctcacagtagccctagggcaccatgagaaagctacgtggacttctctgaccaagggtcactgctgccacactactcattgcaggccatgtcagggctcagctgaggagacgtggacaccaccccagcagccgcggccacggcgtcccaagggagggacttgggcactgcctctctgggcaagagtggggaggtgtggggtgggagatgtctggaaacatcatggacacatgccgggaaaacacggaagctgtgcaccaaggtgctgacaaaggaaaaaggagaatggaggtgtgaacatccagctagcaggtcccactcagaaactcctgcatttccagacatggccaccagctctgtggatgagacaggggaggacagggtacctcacaccaggaacccacacaggtccatgtcttgctctgtgatcacacaacagcctccaccaccctgacatgcaggagggaggtcaaagcctcgggtccaacaacaggctccacagcaagggaagaaaggcaggaaggaactcagggccaggtcctcccaggcagcagctgcctgcacgctgtccaccaagggaggtctgacctacaccgcacaggggttggcagtctagagtcgtcctctgtcaaacggtgagaaagtcaaaagctcatgctcagtgatatgctaggtcagcatgaagatgccacacatgagacacagcaaggatgagaccaacgggaagactgccccagaccagagccccagagccctctggggaggaagaataaggatggcagcctgggactgcccggggctgactctgcctttatttcaccccagcagaggcaggagtgacaccggctcacagcaggagcagctctgccacctcctagcagttccacctacgggcagcaaaacaaagctggcagtttgggcaaatgttagcgtttttgccaactaacatttgaatcggacatctggtacagagatgaggaagaaaacactcacagtttcatgaagactgtcaagaaaatcactgactcttcacttcatttatgaaaggccagctctctgacatccctaccactccctctcacatgagaaatcacggcctttcaggacgtggagccacgtggccatgcaggtacgggaggcctccccgcagctgcagctgggtcttctggtccccgtgccatttctgcttttcttcgctctctacttacacacacatttgagtccagtctcagaagaactggaactagaaaaatcctgacacttgtcccttactacgttaatgccagctgtgccaaggacagcccaacccaagcccccatcagccccaatggcaccgaggcccgagcttacccgtgaggggccaagttggtcgtcaccaacacggtcttcaccccctccacaccactgccgtccactgcagtgtccggagttgtcacaaccaccacctcctccatgtgcacactcacgtcgggagtcgccatggctcagcggaaggggacgcccaggccagcagcgtcagtcctccagggtcccaagtcctggaggaagcaaggcagggcacagggatggagtcatctccacatccacacaacatagcactcacaaaggcatctctaatcagctccaaagacccacccttgagtcccagactgctacctcctgacaaaaacgagcggcaacagaagggctactccaggctctggttccgagggcggtgtaagcgcactccacccgtttttcccactggataagccgaaacccttgggtagaaagcacagagccactccctccacgtggggctcagagcaggaggacaggaggggcctggaattccaagcaacttccctggacgcaggctcccggcttgccagttcttccgtctctcctggcctgaactcaaagccagccccaatccctgaactgagtttcaggtgcagaaagcactccaagaagtcctcgctggtctgtggaacgggaagggaaacccattcaagacagaaagagaggagggaaacgccctgggtttttttgggtttttgggttttttttgagacggagtctcgctctgtcgcccaggctggaatgcagtggcacgacctcggctcactgcaagctccacctcctgggttcaagtgattctcctgcctcagcctctccaattgctgggattacaggtttcaccatgttgcccaggctggtctcaaactcctgacctcaggtgatccactcacctcggcctcccaaagtgctgggattgcaggtgtgaggcaccatgcctggcctgccccgggtttaaaaattattattattttgtctttcctggctttgccttcagcaagtccaacccctgctaaaacccagtgataatggctgtcctggcccaaaaagcttggagacaggggaatcttcctcctgactaaaggaatggtggcccaagagtgtgggggctccctgttgccctctcactctccatcccctacctagcacagggaacacaaaagcccctggtttccagccagagggcaacgagcctggagtcagagtgtgggggaggcgacaagaggagaggggagaagagaggatggcacacagctgtgtgtgagcgcctgggtcgtcccaagacagtctctacgtggtcctgaccctaaagggcaaagggaagaaaactgacctacaggataggccactgcccaggtctcagatgggccccagtggcgcatatgggacagatccacagtgcactggaaagtctctaaaataaactggcctaagaacacagacacaggaacggggtgcaaaatttgcagcctgaacctaaccaggtcgatttcttgctatgaaaaaaaaaagtctacattctctgtgaaacttaaaacaagacctagagtccatagcacagtagtcaaagcatccagaacacgatcaaacttcctggcaaagggtagtctggttgattctcaaaggaacaaatacacaagagaagctggctcttgaacgcagaatccagagactttcaggtgctatcggaccagctccaagaggaaagcaaacattgtcaaccaagtggaaagaaaatcttggtatagaaacaggagttataaccaaacagaaatgtgaaaattaaaaacgacaaccaaaagaaaatacacaaagctgggatagtctcagctactcggaaggcggggctggaggatcgtttgagcctaggagattgaggctgcaatgagctgtgatcacaccaccgcactccagtctgggcaacagagtgagaactctctcaaaaaacgaaaaagaaagaaagtagaacagaagtgaccaggggctgggggagggagtacagggagttgttctttaatgagtacagaatttctgtttgggatgatgaaaagctctggaaatggacggcggtgatggctgcacaatcactgtggctgttctgaatggtgctgaaccacacatttaaaaacagttaaaatgggctgggcgtggtggctcacgcctgtaatcccagcactttgggaggcggatcgcctgaggtcaggagttcgagaccatcctggccaacacagtgaaatcctgtcttgactaaaaatactaaaaattagccaggcatggtggcaggcacctgtagtcccagctacttgggaggctggggcaggagacctgcttgaacccaggaggcagaggttgcagtgagccgagatcgtgccactgcactccagcctgggcaacaagagcgaaactccatctcaaaaaaaaaaaaaaaaaaaaaaaaaaaaaagtttaaaatggttaaattttatgttatgtatattttaccgtaataaaaacactgtaatgctactataatagaatgactcattaggattagatatagactagaaagtacagaatataaaaactttttaaacaaagaaaaattttcatggccaggcatggtgtcacacctgtaatcccaggactttgggaggccaaggcaagaggaatgcttgagctcaggggtttgagaccagcctgggcaacacagcaacaccccatctctgctaaataaataataaaaaatagccaggcatggtggtgtgcacgcctgtagttgcagctactctggaggctgaggcaggaggatcacttaagcccaggaggtcaaggctgcagtgagccatggttgtgccactgcgctccagcctgggcaacagatcaagaccttgtcacaaaaaaaagaaagaaagaaaagaaaaaagaaagaaaataaaatcttccagaacttttaaaatcatcattgttaatataaaaataacatcacctgcccctaggactgtaacaaacaagtgtgtctaaggacaggagtgggtccaccccaacctggcacgcagtggtcccctgcggagagtctggccctgcactcactaaggggaggcactcatagcccagccaggcctctgcaattatgccttcaatgccagaactaactcacccaaactgaacaatcgatcacaaaatgtgccttcaggtctcaaggttcttgctaaatcttactcaaccgacattttccagcatgggaacatttttctgaatgtcttagggagaggaagtccgcaagagaacaaaaggtcctcaggccaccctagcttcttttcctccattccacaggctgtcttttgtctgggtatgcactggaccagggggctctacttcttcctacctgggcatgggtctccacacaactccaaggtaaagggccacaggcaagataaaggggagaaaagaaagctacgatttcctgggccaccaatcgcaaatggcagccagtctctgaagtaacccttgaccagagatccaaggaaccaagaaatgtaggtgatctgaacagaggggatggtggttaaacaccatgaaggaaagacccattctcaaagaaaaggaagcaaaaagaaaccgtggggagctgggtaccacccgcagcaaagaccccgcacgcgttactgacgccagcctggcctgggagagcagtgagtgtggcggacggtgagtggcggggagggctgtggtaggtttagggtaagaaggggcagcgcccagagcccagagaacaccagtgagggctccacaggaacactactcaaagtattcacggaacacatctaaacacaagcactaaggactaagtgcgagggacaagaaaatattccccgtttcctgtttcaggagggtatcgaaaatgagtgatggaaggaaaatgtattgtttaaatgaggaaaaaaaatttttacaaattaagaacatcctggaacatgatgagccgtttactgtcactcaatttaaatggtggccatctaggacagagcgcctaaggggaaagggggctcacaggtgaacccctccagctgctggtgggcaatttcccattagggcatcagggtctctgaagactgtcttcagatgctttttagccaggaaagttacaatgatgaattcgtttacactggcggaattacttcgtatttctcaaatataatgttttcactagcataactttgttgttgtagacttaggcttcaaaataaagaactttaaacaaacatgaataaaaagccactttaggccgggcgcggtggctcacacttgtaatcccagcactttgggaggccgcggcgggtggatcataaggtcagaagttcaaagaccagcctgatcaatacggtgaaaccccgtctctactaaaaatacaaaaattagccgggcgcggtggcaggtgcctgtaatctcagctacttgggaggctgaggcaggagaatcgcttgaacctgggcagcagaggttgcagtgagccaagatcatgccactgcactcaagcctgggtgacagagtgagactctctcttaaaaaaaaaaagccactttaaaattttactcaggccaggtgtggtggctcacgcccataatcctagcactttgggaggccgaggcgagcagatcacctgaggtcaggagttagaccagcctggccaacatggtaaaaccttgtctctactgaaaacacaaaaattagctgggcgtggtggtgtgcccatgtaatcccagctactcaggaggctgaagtgagagaactgcttgaacccgggaggcagaggctgcagtgtgccaagactgcaccactacacttcagcctgggcgacagagcaagaccctgtctcagaaaaaaaaaaaattcaaaaatttggccaggcgtggtggctcacgcctgtaatcccatcactttggaaggccgaggcgggtggatcacctgaggtcaggaattcaagaccagcctggccaccatgatgaaaccctgtctctactaaaaatacaaaaaaaaaaaaacaaattggccgggcatggtggcgggtgcctgtaatcccacctacttgggaggctgaggcaggagaatctctcgaactccggaggcagaggttgcagcgagccaagattgtgccactgcactccagcctagacaacagagcgagactctgtctcaaaaaaaaaaaaattaaaattaaaaaataaaaatttcatttaaaatactactgatctcccgtgctgacttctcggggtttaactctcactgaggagacgctgctttcataagggtaagctcagcaggggcaactaaagtcatttaagcagagagctgcaaagaggcaacagcctcactgcaggcaggggtcctcgtcacagcttcagggctttgcagaggattacgcaatgtacacgcacaaaactgaattccagcctctccattggcaactgcatacatacatatattctttttttgagacggagtctcgctctgtagcccaggttggactgcagtggcccgatctcggctcaatgcaagctctgcctcccgggttcaagcgattctcttgcctcagcctcctgagtagctgggattacaggcgcccaccaccacgcccggctaatttttgtatttttagtagagacggggtttcaccatgttggccaggacagtctcgatctcctgacctcgtgatccgcccgcctctgcctcccaaagtgctgggattacaggcgtgagccactgagcctggcctccaatggcaactatattaaaggttcaaagcaatatgcacaaaagttacctcacagaaaatagtgcaagtccttgatacaatgctctttagacacagaagaagcactatagaatagagcacctcgccctattgccttcccaagggcgagcaccccctcctctctccacagctccttctttgtttttttgagatggagtctcgctctgtcacccaggctggagtgcaatggcaaaatcttggctcactgcaacctccgcctcccgggttgaagtgattctcctgcctcagcctcccgagtagctgggactacaggcacccaacacgcctagctaatttttgcatttttggtagagacggggtttcatcatgttggccaggctggtctcgaactcctgacctccagtgatcctcccaccttgacctcccatagtgctgggattataggtgtgagccactacacctggcctctccacagccccttctgtgttgaagccaagacccacccagctttgatcccaaggcttgggttccccactagtgtgaagtgagtttccaaattattaggtaaatcagatatgagaaaatattttattttacttttttttttttgagacgcaatcttgctccgtcacccaggctggagtgcaatggcaccatctccactcactgcaacctctgccttctgggttcaagcaattctcctgcctcagcctcccaactagctgggattacaagtgcacaccaccacgcccggctaacttttgtatttttagtagagacagggtttcaccgtgttagccaggctgctctcaaactcctgacctcatgatccgcccacgtcgggctcccaaagtggtgggattacaggtgtgagccatcacacctggcccaagaaaatatttttaaactagtattcttgaccggcacggtcaacactgatgtaattgaaactgttgtatttgaagtgttagcaaagaaagagaattctggttcaacagaaaagtcagtcacgacttttcagtcacgcatgaattacacagtaaccaaatagataacatgccatgactgacgacgggcccacaacaaatcagctccgaccaacagggtccacaccaccatgggtctacacagatccaggtcccgcctgtgagcctacagtgacgcgggcccctgtggggtggtccctgcaggtcaggtccctgagagtgggtcccagtggggtgatccctgcgggtcgcgtccctgcgagttgggtgcctgccgggtggcccctgcgggtcgggtgcctgcggggtggtccctatgggtcgcgtccctgcgggtcgggtgcctgcggggtggcccctgggaatcgcgtccctgcgggtcgggtgcctgcggggtggcccctggggatcgcgtccctgcgggtcgggtgcctgcggggtggcccctggggatcgcgtccctgcgggtcgggtgcctgcggggtggtccttgtgggtcgcgtccctgtggggtggtccctgtgggtcgcgtccctgtggggtggcccctgcgggtcgcgtggtggcccctgcgggtcgggtgcctgcggggtggtccctgtgggtcgcgtccctgcgggtcgggtgcctgcggggtggtccctgcgggtcgcacccctgcggcgtggtccccccgggatgggtccaccgaggaggccgctggaggccgagcccgcgcccgcccgcggcgccaagatggaggcaggaagcgccgccgcccgcgcccgccaccgcccgcgccgcccgcctgacgccgccgttgcgcctgacgccgccgcccgcgcggccgcccctcccccggccctcccctccccccgccgtaacgtcctgacgctccgcagggacccctgactggacggcggcgcgtgagcggagcgagaggcctcgccgcgggggggccgcgggctcgccggcgccgcttacctggggccgcgccgggcctgcttaggcacccggcgggggcggcggcgtcgggagctgcggcggcggcgggcggcggcggcggccgcgggcttcgctccttgttggggattcggcggcggcggcggcgcgggcgcgcgcttcctagtgacgcaggcggcggggccgcgcacgcacggggctgggagggccggacacttatttggcgctcgcggaggaggaaggcggggccgtgaaataaggcccgacgggccccggggcgcgtgcgcggaccgacactgtcagctcctaacgccgcaggttcctcctggtccccgaggcccccggtcgggcgttgcctgccccgcgcgggcggccgggccgagggacgatggtcagtggacggacggcgccagggagcagtgcccacgcgcggcagggcggtaccttcaggcctccaggtacgggcgctcctcgcccggacgctgctgtgtgtgaatgggcgcgaggggactcccctgcggggcggacgcctgaacacgaggctgtggaggaggacgctgtagggtgcgcggactcacgcggaacatgccagaggctcagccagccacggcgctcccagcgtggagggcgaggggcatccgggagcggccgggagggctcggtcacccctcaagctgtcaccccagtcccacaaccagcaccccgatcctatcgcagtcccacagccgacaccccgatcccacccctgcccaacagccggcacccaccccaatcccatagctaacaccccggtcccaccgctgtcccacggccggcaccccgatcccaccccagtcccgcagctggcaccccgatcccaccccagcccaacagctggcacccaccccgatcccaccgctgtcccacagccggcaccccgatcccaccccagtcccgcagccggcaccccgatcccacagccggcactcaccccgatcgcatagcatagctgataccccgatcccaccccagtcccatagccagcaccccgatcccaccccagtcccatagccagcacctcgatcccatagatgacaccccgatcccgccccagtcctatagcccgcaccccgatcccacccgagtcccgcagccggcaccccatcccacccatgtcccacagtcggcaccccgatcccactcggatccggcagccagcttggatcctgtggccctcctccagcccccagggctcatttatatgttttattggcagaggctggggctggctctgttggcctctgtgctgggtttcttcctctgcaccgcaggactggctctcctgacctctccaggtgtcatcgaacacccttgtgcttgctgtcacccgctgcctgtctgcaggatcccggattccgtatcaggggaccgaaattagtcggaaaataggaagcaggtgctcgcttggatggaaccctgaccctgtgctcacacttgtaggaggagggctctgcaggccgcctcccggaacgggaggttcccaagccactgcacttcggaggggctgtaattagagttgcacattcattcagttcccagtaaagtagaacgtgctccagccagtgaggaaaaggtgtttttaaaaattagattggccgagtgcggtggctcatgccttttacctcaacactttgggagacaaaggtgggaggatcacctgtggccaggagttcaagaccagcctgggcaacagagcctgtctctggggaagaataaaaaaaaaaattgagcctttgtcagtgctactattttattatctggtaaatatgagagggttcacgcggtctatgtgtgtcatttatctgagtttgcctatcgtcacgttttggaaataaatgtcaataaagtcgaagaggagtgctgaggggggcctggggatgggagggtggctacatcatgcctgtgtgttgcgcaagcccaccgaggtcggcctggggtgagccctggggcctgttctgcctccttcactctggggctccaagagacaaactgggcaacaagagagaaactccatctaaaaaaaaagaaaaatcacctccaagataacttagctttcttctgctggcataacaaattatctcaaacttagtcgcttaaaaatgcaaatttaggctgagtgcggaggctcacgcccataatcctagcactttgggaggccaaggcaggattgcttgaggccaggagttcgagaccaacatggccagaactgtctctttttaaaaaatgcaaatgtgtccggcacggtggctcacgcctataatcccagcactttgtgaggccaaggcgggcagatcacgaggtcaggagatagagaccatcctggctaacactgtgaaaccccctctctactaaaaatacaaaaaattagcctggcgtggtggcaggcgcctgtagtcccagctactcgggaggctgaggcaggagaatggcgtgaacccaggaagcggagcttgcagtgagccgagatggcgccactgcactccagcctaggcaacagagcaagactccgtctcaaaaaataaataaataaaactgcaaatgtattctctaactgttctgtaggtcggaagtccagcccagcctcactccgccaaaatcagggtgtctgcagggccgattgcttttggagctccaggggagaagctgttctggcctttccagtttctggaagcacttgagccccttgtctcgtggcctatcccacacctgaaagccagccaaagccagttgagtcctcaccctgttggccccgacactgatctcctgcctccctcatctgctgtcaaggccccttgtgatgacatggggccaccagctggcccagggcacctcctgtcagagtccgccgaccagtgaccttcattccatctgtcgctgtaattcccctttgcttggaaccaacgttcacagatcccaggggttaggatgtgaatatcttgggcagggctgtgggggggctattcttccttctaaaatatttatcatttttgttttggggatttttttggtttggttttttttgagacagagtctcgctctgtcgcccaggttggagtgcaatggtgcaatctcagctcactgcaacctctgcctccgggcagacgtgagccactgcaccaggcctgtttttgtttttgtttgttttgttttgtttttgagatggagtctcggccgggcgcggtggctcacgcctgtaatcccagcactttgggaggccgaggcgggcggatcacgaggtcaggagatcgagaccatcctggctaacacggtgaaaccccgtctctactaaaaatacaaaaaattagccgggcgtggtagcgggcgcctgtagtcccagctactcgggaggctgaggcaggagaatggcgtgaacccgggaggcggagcttgcagtgagccgagatcgcgccactgcactccagcctgggcgacagagcgagactccgtctcaaaaaaaaaaaaaaaaaaaaaaaagagatggagtctcactttgtcacccaggctggagtgtagtggcgggattataggtacgcgccatcatgcccagttactttttgtatttttagtagagacagggttttaccatgttggtcagactggtctcaaactcctgatctcaggtaatccacccgcctcagcctcccaaagtgctgggattacagacgtgagccaccgtgtctggccatatttattaactacaaagggaaagatgataatttttttttttgagatggagtctcactctgtcacccaggctggagtacaatagcgtgatcttggctcactgaaacctctgcctcccaggttcaagcgattctcctgcctcagcctcccaactagctgggattacaggcgcacgctaccaagcccagctaatttttgtatttttagtagaaacggagtttcaccatgttggtgaggctggtctcgaactcctgaccttgtgatctgcccacctcggcctcccaaagtgctgggattataggcatgagccactgcaaccggctgaaagatggtaattttaaagtagagaaactgggttggctgggcatggtggcttatgcctgtaagctcagcactttggaagtccaaggcaagaggatcgcttgagtccaggagtttgagaccagcctggacaatatagcaagaccccatctccgcaaaagctaaaaagttagccaggtgtggcggcacatgcctgtagtcccagctactcaggaggctgacgtgggaggatcacttgagaccaggaggtcaaggctgaagtgagctgttattgtgccactgcactcagcctgggcaacagagcgagagtctgtctccaaaggtaaaaaaaggtccaggcacagtggctcacacctgtaatctcagcactttgggaggccgaggcgggcagattcgttgaggtcaggagttcaaaacgagcctggctaaatggtgaaaccccgtctctactaaaaatacaaaaaaattagccaggcatggtgacgggcgcctgtaatctcagctacttgggagactgaggcaggagaatcatgtaaacccaggaggctgaggttgcagcgagccaagatcatgccactgcacttcagcctgggcgacagagcaagactgtctcaaaacaaaacaaaagaatcttgagtcctgagttcctctaagggaaattccaggcacctcgccacccttgacaggcaaaggaacaatctgatgaggaagaagatagaaacagcttaaacaatagtctcccggccgggggcagtggctcacgcctgtaatctgagcactttgggaggccgaggcgggtggatcacaaggtcaagagatcaagaccatcctggctaacatggtgaaaccccgtctctactaaaaatacaaaaaattagccgggcgtggtggtgggtgcctgtagtcccagctactcgggaggctgaggcaggagaatggcgtgaacccaggaggcggagctttcagtgagctgatatcgcgcctctgcactccagcctgggcgacagagcctcgagactccatctcaaaaaaaaaaaaaaattagctgggtgtggtggctcacacctgtaatcccagctacgtggcaggctgaggcaggagaatcgcttgaacctgggaggcggaggttgtagggagctgagatcgcaccactgcactccagcctgggcaacagagcgagactctgtctcaaagaaaaaaaaaaaaaacaaaaaaacaatagtctcccaagtaagtcagagtcacaaggtgttttgattccctgtggaaactaaaatataacagcttaacatatgttcttgagttatttttcagaaacttggacatccaccaggtggaaaatgctgagctaggaacagtggctataatttcagccttttgagaggccaaggtggaaggatcacttgaggccaggagttagagaccagcctggccaacatggtgaaaccccgtctctagtaaaaatacaaatattagctgggcatggtggtgcaacctgaaatcccagctacttgggagacctagctgggaggatcgcttgaacctggtaggaggagtttgcagtgagctgaaattgtgccactgcactctagcctgggcaacagagtgagactctgtctcaaaaaataaataaataaaaagagaaaaaagtgttgcctgcaggccgggcacagtggctcacgcctgtaatcccaacactttgggaggccgagatgggcagatcacctgaggtcaggagtgcaagaacagcctggccaacatggtgaaaccccatctctactaaaaatacaaaagttagctgggtgtgtacatgtagtctcagctacttgggaagctgaggcaggagaatctcttcaaccggggaggtggaggttgcgatgagctgagatcacgccaccacactccatccagcctgggtgacagagtgagactccatctcaaagcaaaaaaagaaacataggtgggacccttggtgtgtccttagggcatgatggttgaggtatactgctggtcctgtcatgtaaaagaaaacgagccgactctgtgtctactggagaaagcactgcatatatcagccacagtcaatacctcgcttctgcagggacggtggctgccagagtgggaggctttggtagcacccatgtcgtggaatcacaatgttgtcgatagctctggggtcttgtacaaaatgccagatcctcccatttggtttccttatgggaaggatcgcagtactataatacatgggcttgtgcaagggatcattatacccttttctctttttttgcttttctttgagacagagtttcactctcgtcacccaggctggagtgcaatggcgcgatcttggctcactgcaacctccacctcctgggttcaagtgattttcctggctcagccttctgagtagctgggattacacatgcccgccaccaggcctgacttatttttgtatttttagtagagacagggtttcaccaagttggtcaggctggtcttgaactcctgacctcaggtgatccacccacctcggcctcccaaagtgttgggatttcaggcataagccaccaggcccagcctttctttctttttaaaattaatctttgtttaaaaatactctcattttttatttaattgtagcactcctagatcccgaaagcagatacactcttgttatgggtctgattcttttcattgcttcacgccttagaggatattgtccaatactggataaaagtttactcaggtctacttccactttaacggggatggctgaatatctcttccacttggctgttcgtttataatgaactgacaaacatacaaattttcttgagttctgtgagacattctagtaaatcatctaacctgaagagcaggttgtgagaacccctgatttagaaagcccagtggtcataaatataagtggctctggactggctcccggggtctgaagtgtgggcagtcggttaggattgagcccttgtaatttgtaggatctgacacaccctccaggaaggcagtgtcagaatttacctgtattatattggacacccagttagcggttggagaattggttgctggtatagaaaaataccaaatattttatgtcaggggagtgaaagaaaaaacaaaaacccggccgggcgcggtggctcacgcctgtcatcccagcactttgggaggccgagacgggcggatcacgaggtcaggagatcgagaccatcctggctaacacggtgaaaccccatctctactaaaaatacaaaaattagccgggcgtggtggcgcgcgcctgtagtcccagctactcgggaggctgaggcaggagaatggcgtgaacccgggaggcggagcttgcagtgagcccagatcgcgccaccgcactccagcctgggcgacagagcgagctccgtctcaaaaaaaaaaaaaaaaaaaaaacccatacactttaaggaaagcaactgacagcatttgttaccagtgataaaatttgagctttgaagtaagaataacaattttgccattgtgcccgggccaagaaaaaaaaaagaattttgccattgtgaaaggcttcccagtactttctgatgagcttgacggtgatattaacaaataactttttttttttttttttgagatggggtcttgctctgtcacccaggctggagtgcagtggttcaatctcagctcactgcaacctccgcctcccaggttcaagcgattctcctgcctcaacgtcccaagtcgctggactacaggtgtgcgccaccacgtccagataatttttgtatttttagtagagatggggtttcaccatgttgcccagactggtctcaaactcgtgacctcaggcgacccgcccacctcggcctcccaaaggtgggaggccttgctgggattagaggtatgagccgctgcacctggcctcttgtccttgtgttttgcagtgatgcaatgaccatgtcttacatttgcaaccagaaaaaaaggttagtgtaacaatgtttatcctgtttttcccagagtagacattatgaagattaaaaaaatttgaaagtgttttgaatataataaactatgctatacacacaacattttggtgactagaaatacaagtttattgtttgttgtttgttgagacagggccctgctctgtctcccaggctgggtggcacaatcatggctcactacagtcttgaactcctgggcttaagcgatcctcccacctcagcctccagagtagctgggactgcaaacgagcaccaccacgcctggctaatatttgtattttttgtagagatggggtttcaccatgttgcccagactggtctcaaactcctgggctcaagcaatgctcctgcctcggcctcccaaagtgctgggatcacaagtatgagccactgcacccggctgagtttctgttgttttaagccgcttcatttgtggtacttcttacagcagtcccaggaaactgagcaactgcagaacatcaaaattgtttttcttcagcaaaaggagaagcacttgtggttggcaccagcttttcctgtgctcacttctgcatggccgcacctttgcccgacacgagtgcacagcaggctgtgggggagcaactggttgagtcaggcctccacttgtgccgtatccccacctgctttgctggacacccctgtttggggggcacccactgctgccccagacaccaagcaagcaccagctgtgtccaaaacatacagtcactgtcttggcccgttttgtgctgctgtaacagaatgccacagactgggtaatttaatacagaacagaaatttatttcctcaaagttttggaggctgggaagtccaagagcaaggggccatcaggtcagggcctggtctctgcttccacgatggcaccttgaccaccgtgtcctcacgtggtcagagagagcccactcccaggagcccttttaatagagcagaacactgctgcgctgcggttaagtttccaacacgtgaacttcggaggtgacacattcagatcatagcagtcactctaggcagagtgtctgatgtggttttaaaatacgttcacagactggccgggcactgtagctcacgtctgtaatcccaacagtttgggaggccaaggtgggtggatcacctgaggtcaggagttcaagaccagcctcaccaacatggtgaaaccccatctctactaaaaatacaaaattagccaggtggtgcatgcctgtaatcccagctactcgggaggccgaggctggagaatcgcttgaatccaggaggtggaggttacagtgagtcgagatcatgccattgcactccagcctgggcaacaagagcgaaactctgtctcaaaaaataaaataaaataaaatacattcacaaggccgggcactgtggctcacgcctgtaatcccagctacttgggagactgaggcaggagaatcgcttataacctgggaggtggaggttgcagtgagctgagatcacaccgctacactctagcttgggcaacaagagtgaaactccgtctcaaaaaagtaaaataaggccaggcatggtggcccacacctgtaatcccagcactttaggaggccaaggcggtcggatcacgaggtcaggagttcgagaccagcctggccaacatgatgaaaccccgtctctactagcctagccaacatggggaaaccctgtctctactaaaaatacaaaaattagccaggcgtggtggtgcgtgcctgtaatcccagctactcaggaggctgaggcaggagaatcgcttgaacccaggaagcagagggtgcagtgagccaagattgcgccgctgctctctagcctgggcgacagagcgagactccatctctaaataaataaataaaataagaaaataaaatatgttcacaaatcctttgacattcctcacctcaaaagctggaacccaactccctcctaagcatgagtcttctcagtgactcacttctaacagcagatcttacatggttccccacacccagaggacattgggttcctcccaatatccccccacccagcgacccccacccaggtcgctggctttgggtcccccagagccatgtttcaaggacactcaggcagcccctggatgtccatgtggtaaggaatgaaggcctcctgcctgcagcctcgggagggagcattctcagaagaggatgccccacctcctgcccagccttcagatggccaggacctcgtccaacgtcctgactgcaacatcatgagagactccgagccagaaacccccaggttttgtactcctgacttatgggaactgacagataatgttcgttgttaattaaggggtgacttgtcacacacaataggtcactaaacagctctgtctggcctcccaggaggagcctgcctttccttttcttcatgggaaaagtgcgatcagtttgtgaaggaatgtccgcccccacttgatgccagaggctccacatggtgactgtcataaactccatctgccctcagtgccttgccagcacccggcctgcgatcagcttggtcttgcgggaggccaaggcccacgtgtgtttgtgtgtggtgtctgtgtctgcgtgcccatgcatgcccagggtacagggatgccatatacaaattctttcaatgttgtatgtggcatgtgtgtgtctgtatgcccaggatacagggatgctatatacaaactctgttttttcgtttttttttttttgagacagagtcttgctgtttcgcccaggccggactgcagtggcgctatctcggctcactgcaagctccacctcccgggttcacgccatcctcctgcctcagcctcctgagtagctggaactacaggcgcccgccaccacacccggctaattttttgtatttttagtagagacggggtttcaccatgttagccaggatggtcttgatctcctgacctcgtgatccacccgcctcagcctcccaaagtgctgggattacaggcatgagccaccgcgcctggcctacaaactctttcttttttttttttttttttttgagatggagtctcactgtcttccaggctggagtgcagtgatgcgatctcagctcactgcaagctccacctcccgggttcatgccattctcctgcctcagcctcccaagtagctgggactacaggcacacaccaccacgcccagctaattttttgtgtttttagcagagatggggtttcaccatgttagccaggatggtctcgatctcctgacctcgtgatccgcccgcctcggcctcccaaagtgctgggattacaggcgtgagccactgcgcccagcctgcaaactctttcaatgtctttcttttctctctcctgccatcttctcccttgcagatttcttttgtctctaggtcttccccagctgagtccgaggtcctgacttgcccacgctccctggactggaggagaggtgatagcaagagctccttcaagcccaggaatgccaccagggctgccctgggagaggaggaagctgggtctctcggggttgtggggaccagacacccttctaagacatggactcagcacagaaagtctagacatccactacaaacacatctccctcctaacagggggcccctgggcaccccaagtggctgtttggtgggacaggcatgtccatcagtcagaatatctttattttttattttttattttttatttttgagagagtttcactggagtgcaatggcacgacctcagctccctacaacctccgcctcccaggttcaagcgattctcctgcctcagcctgccacgtagctgggattacaggtgtgagccaccacacccagctaattttttttttttttttttgagatggagtctcgaggctctgtcgcccaggctggagtgcagaggcgcgatctcagctcactgaaagctccgcctcctgggttcacgccattctcctgcctcagcctcccgagtagctgggattacaggcatgagccaccgcgcccggccaattttgtatttttagtagagacagggtttcaccatgttggtcaggctggtcttgaactcctgacctcaggtgatccacctccctcggcctcccaaagtgctgggattacaggcctgagccaccacgcccagcccagaacgtcttcttactttttattactctgtcccccatcctgggtccagacctgtgaccgtgaacaaccggctgcccaggggtgaatggggtgagtggggtgagtccacagaacagtggggtgcagccccaggggtctcgtagcacctgcccccatgtcaggaagtcccacagcctagaggctccagcctcagatgcatacatatgtaggccctgccctttcctcctgagcggcgggccacagagtcctgaacaacaggaagcccctgaggagggctccgccctgagggagggcaggggagcccccgccagccccacccacagcagcgggccctgccaccccccaccctgacacctcaccccttggattccagagaggaaagtgggcttgtgtgtagtttacatgctcatatcttaaaatcactgttgtcaatagaacaattcataatcatgatgataaaataagatttataaccagcttcagtctggagatacacacagagcagatcttcactcccagacagggagcccgcagctgcccccgaccccacaggtgcaggacacacacagacagttcaaccatgtcttaaacacacaggtgtttatttaattgttcatttgattgaatttttaagttcactttactacgtggatgagatgggtgcatattacagtaggctttcgctatgagcgctgccaccatgaggaatatcccagccctcagttctgcttccctttctgagtcccacaaaagccagatgtggacagccttgggttcccatcccagctggctgctccttctggggctgtcttggtggggagagggagatggggcagtgggtccctgctgacccctgagccctgcaggggtcaggatcctcccgtggtccctgggtgtgactctggaagacactggcagtgcccggccaaggcctcccgcaggatggaagttgagggccctggctctgggtcctaagagaactcagccgcccccttcacactttacagcaaggggccaggcagcagctttgggatggggcttccgtggagaagtgggggatgctgcagtggtacaaagacagcctcccccaccgccatcctccagctgaccgtcctccaaggccagcactgggcgtccaagggaaagaaggaactcagcccagagggtgtgggcaggagaggcctggagtcaggcctccacccacagccccctctgggtgccaagtgggaagggtgttggggctggcttgggaaccttacccgctgcccttccaacacctggatctgtgggcagcggtcccacaaaatcccccttggggctccctgaggaggacttgtggctgccgcttccaccagggcagagggcacaggaggggccagcactccaaagggctctagggtgggtctttcaaggacatctgcaaagccctggtggggaggggcctgggccagaggctctttggaactcttgcacttctgagtgggggactgtccatgctgcccacaacctctagaccatgcagcctgctcatgggtccctggcagagaatgcccactccccagcagactcagggcaggcccccaactgcaggcttccaggaaggcccagggtgtccacctcacgccaggtggtctcagaggacccctgtgcaaccacattaaggaaagctgcagcccccacccacccgcctgccagttcaacaagcaccggctgcacacgcaggctcccaggcaccatcacccccctcccccgtcgcccctccctcatggggagccccttccccctggaaagacagcaggtactgtagcctcgcctgctggccaggggcgccggctcagaggacctgccctgacctgcacgtgctgaccagacagcccagcgtaaggacccgtgatcccacgccaccgccctgggtttaccacggtcaccgccacctctctcacagggcccccgggggacccagccgcgcccggcctggtgtctgcaccgagggaccgcgtctcacgcccggcggctcctgcaggggaagccgtggtcagcgactcaccacgaggacagggcagggcggctgagtgcggaagagaagcatgaagctgggggcgggggtgggggaggaggaacaaaagttgcatctagacagaggtgaacgaaacaaaaccaaaacccgaacgtgttctgtcgcaggatgggcgccgcccgtcccgggcccttagcccgacatctcttctcgctgctccttgttcctgcgcacctcggccgcgtgcagctcctgcaggacagggggcgggagggcctgagggcgggggtggcttggggcgactccgggaacccccaggcgcgcaggccgtggcgccctggcacccgcccggcctcatccgggctggccttcggcaggaccctgactgagttgagggggcgggagcaccggggaggcgcagagcaaggccagggaccaaggacgggtttcctgggagctggctgggccccgcttctagctcgtaccggagccgagcttccttcagggcactttcaatataatgaatttagccatctattactgcggctagttactgtcccgccaggaccagactctggacctgcctcgtgcgctgctggggacgcccagtaaacacgggaggagcccccgacccccaccccagctcagcgcctcggagtccccggccccgctctgcgcccctccgagctccgccctagccccgcccccgcccagtgccccgccccctgcctgctgctagccctgcccccgccccggcccctgcccgctccgagctccgccccggccccgccccggcccctgcccgctccgagctccgccctggccccgcccccgcccagtgccccgccccctgactgctgctagccctgcccccgccccggcccctgcccgctccgagcttcgccccggccccgccccggcccctgcccgctccgagctccgccccggccccgcccccgcaccttctcgcgcagccgctcgcgcagtgcggccaggtgtgcctcgcggatctccttgctgagctccatcttgtagttgagcttctcctccgcctggcggctgaagttgttattctcctccagcgccttgtgcagcacctcgcgctcgtgctcgcgccgctccgccagctgcttcagcacctgcgcctcctgcgtctgtgcggggccggcgggcgcgcgtgagcggcaaccccgggccctgcccggccggactcctccctgctctccgcctcccgcccagcgcccgctcgcctcacctggcgcctccacctgcccaggcctcggtgggcgccgggacccccgggcgctgccctgggaaccctcgcctgccatccggcctgtggtcggggcagggccagggggtcgcgatccgccgcccccgcccccgtccctgcctcgcgcgcgggtcccgcggtcctggctgcgcccagggcccccgccataccctgccgccactgcacaccctgccctgcgcgtctgcccctccaaggaccagcagcaagaaaccctaaacttgtgggcggtctctgagctttgtctcttcctcggacatccgcccactgagcagagtagctgcttgttacacaccgggttcccagctcccaattaggtgcccaggagcggagggtccccagggatgctgggggaggggccggctggtgacccctgggaggagagcggggcagcaggacccgcacccacatgccagtccctactagtcagccctgtgaaccctggtctctggcctcaccgggaagggaacggagccgcttcccctgcccaatgcgttggcctccagggtggcacccccaaaaggacatttttatctctgtttcagtctcagaggggctggtgggaggggaggctgcagggaggggacctggagcccacacccacctctcccagggcccctccgccctccagcaagcctcagggtcttcacacatgaggcccttcctccagcttccctgtctgggagagggatgccccacccgacgtccccagggcccatctggggaccaccccctagcatcctgctggccctgacaagggtgcctcccaccctcaccagaggctcctgctccttccaggtggccgcctcggaacccttcctcctctccatccctttctttttttgttcttgtttgttttttgaaatggagtctcaccctgtcgcccgggctgaggagtgcagtggcgcagtctcggctcactgcatcctccacttcttgggttcaagcaattcccctgcctcagactccctagtaggtgggattacaggtgtgcaccaccacacctggctaattttgtatttttagtacagatggggtttcaccatgttggccaggctgatcttgaacttccaacctcaagtgatctgcctgcctcagcttcccaaagttctgggattacaggcgtgagccaccacacccggcctctccccatcccattcttatctctcagaaagaggcccagggagccacagcccctcctgctccaggccaaggcactgaccaagcctgtccgggagcaccctgcttcttgcaggccctgtccccgtgggccgcctccgttgaaactcctggggggtgggggatggaggactccttgccttcctccgctcctcggctgcctccagccgcttttgcagctcctccagggaggtgtccttcttcttgggtggggaggagagcatagggctctctggggacaggtcagaaggggacttgaggatgacctcgaagctctggcctgaggcccgcttgtccagctgcttcacctccatgtctgcagggcaagaccagagtagagcttcagaggcccggccagggcatggcgtgggctgagcgggatgctcccagcacacatccaaccccagggctgggcgagagggggtggctgctcccgcaggaatcccaggcttcagcccccaggatgggccccttccccctagaacctccctctccagaggcagccaggacgggagttcagagagactgccggaggccgggggaaaaggtgaggtgggcaggcaccgcagggaagggcaggcggcagccaggcactcacccccgtactggtagacggtattggggtgcggctgtgtgtagaagcaggagcagatgagcgacagcaccgacagctccttcatcttctccttgtaggctgtgggcacaaggctgggctgagcaagcaccactggggcctgcccacctgggcccccgttttccctccccatggctgcctctatcatgtctctgtgagacacggagctgcccagcacgctctcttgtgtgtctccacaccgccggccccttcgtctctccagctctctcgcttccagacgtcggcactgtctccgtggtgtgtcccctgccttctgtctctctcgccctctgcctctccccgcttttcctctctctcggcattaatgtctgtctcatcttccacactgacttgtttctccatccttctcctgcctgctgtggtctgaatgtttccattacccaaaactcatgtgttgaaatcgtaaccccaaggtgccggtgtgcggaggtgaggcattcggagggaattaggccatgaggatagagccctcctaagtggccccagagtggggcttcagagaactccctcaccttccatcatgtgaggacacagccagaagacgccacccgtctatgtaccaggaggcgagacctctccaggcaccgactctgccggcaccttgatcctggactttctggcctccagagcgatgggaaataagttcctgtcgtctataaaccactcagtctcaggtacctgcccagactgacaaagtggctacccctgcctgtctgggtctctgtttaccttctgtgtgtctgactctgtcactgtcattgtatctttctgtgtctctgggggtagcccctgactctgtctttctccctgagtgcatctttctgtgattccttgtcactgtgtgtctttctgactcttacctccctctgtcccgctacttctctctcccctcctcctccttcccactcctcgccagctcaagcaggcaagatttactcatgacgggaccagcacagatgcaaaccctctgtgggcaggactttcttgggctgtaaacctggatgaagccctcagaccctcctttttccttcccaatgattgtgtggtcaccttgagatgaaaccaggccctctccaggcacatgctctctgtctatctagggctgggcttgggccactgatgccaccaaggagcaagggagggaagctgtccgttcagcaccacagccagccctcttgcccattcaggtcaatcaagtgcccaccagccagtgtccctgctgcccaacccaaaccagaagcaagccgggctcctgtggccctgtgccctgtcaggggaagaggaaggcgcctgctgtcacagtgaaaataatttagctcttttggtctattcagggcgaacctcattcctaagcagacacgctggcccggtttctcactagtgctcgataatccttttggctgggtgcagtggctcatttaactgtaatcccagcactttgggaggccaaggcaggtggaacacctgaggtcaggagtttgagaccagcctgaccaacatggtgaaacccgatctctactaaaaatataaaaattagccaggcgtggtggcaggcacctgtaatcctagctacttgggaggctgaggcaggagaatcgcttgaacctgggaggcggaggttgcagtgagccgaggtcgcgccatcgcactccagcctgggtgacagtgtgagactccgtctcaaaacagaaagaaaaagagagagaggaagaaaggaaggagggagggagggaggaaaagaagaaaggaaaggaaaggaagacagacaaggcagaagtaatcaagcctttcatggtgagctgggtcttctggtgacagtgcagagaatggtctgtcctgacttaaatttcctggtgacctacacttttctggacagagcagcacagagcccaagagggtgtaaggaggagcagaaaggaatcccagggtgggcaggcccgtgcgagagcctttgggggaaggaatgagactttgagccgggaagcgaggcaaagctacctgtcttggtcattgtcttcagggagggagatggagggggaccaggtgggggagcctcacaggggactttggtctgacttgtcaagttttctttttttctttttgagatggagtcttgcactgttgcccaggctgcagtgcagtggtgcgatctcggctcaccgcaagctccgcctcctgggttcacaccattctcctgcctcagcctcccgagtagctgggaccacaggcaccgccaccacacccagctaattttttgtatttttagtagagacggggtttcactatattagccaggatagtctcgatctcctgacctcgtgatccgcccgcctcgacctcccaaagtgctgggattacaggtgtgagccactgtgcctggcctactttattttttagaaacaggactgtgctctgttgcccatgctggagtgtagggtgcagctgtgcggttcactgcagccttgaacttctgggcttgacggatcctgccatcttagcagctgggactacaggtgcatgccagcacaccagttttctttttttttttatctctgctcactgcaattccgcctcctgggttctagcgattctcctgcctcagcctcccaagtagcagggattacacgcacatgccaccacacccggctaatttttgtatttttagtagagacagggtttcactatgttggtcaggctggtcttgagccaccgcgcccgcccggcctacacaccagcttaaaaaaaagaaaaaaatagctgggcgtggtggctcatgcctgtaatcccagcactttgggaggctgaggcaggcagatcacctgaggtcaggagttcaagaccaacctggccaacatggcgaaaccctgtctctactacaaatataaaaatcagccaggcgtggtggcgggctcctctaattccagctacttgggaggctgaggcaggagaatcacttgaacccgggaggtggaggttgaagtgagccaagatcgagctactgcactccagcctgggagcaagactcccgtctcaaaaaaaaaaaaaaaatttgtagtggtatggaggccgggcatggtggctcacgcctgtaatcccagaactttgaggggccaaggcgggcagatcatgaggtcaggagttcgagaccagcctgaccaacatgatgaaaccctgtctctactaaaaataacaaaaattagccaggcatggtggcgggcacgtgtagtcccagctactcgggagactgagacgggagaatcgcttgaacccaggaggcagaggttgcagtgagctgagatcacgccactgcactccagcctgggtgacagagtgagactctgtctcaaaaacaaacacaaacaaacatatatatatatacatgtatatatataatatatatatacgtatatatacacgtgtatatatataatatatatacacgtgtatatatattatatacatatatatacacgtgtatatatataatatatatacatatatacacgtgtatatatataatatatatacgtatatatacacgtgtatatataatatatatacgtatatatgtatatattaatatatatacgtatatatacacgtgtatatattaatatatatacgtatatatacacgtgtgtatatattaatatatatacgtatatatgtgtgtgtgtgtatatatatatgtatatatatatatatatatacatatatatatacagagagagagagagtagtgataggtcttgctgtcttgtccaggctgatcttgaactcccggcctcaagagaccctcccacctcagcctcccaaagcactaggattataggtgtaagccacagtacctagcctattaaaaattaatgttaaacaagaggatgtgatgagggagttagagggtgtgccagccatgtgttccacagcagcaggtcaggagacattggggacatttagaggagctgaagaggtggccaaccctgtgctcaggaggacgggggagggagagagcaagagggagtttgggctggggcagaacgtacctgggtcctgagaggataagaaggtagggacttggcccctccaggcctgactctgccagcaaccagctccctatcagcagactccaggcccctacccttcagctcatccttccttatcacacatccaaaactctgaatgtggccgggcgcagtggctcacgcctgtaatcccagaactttgggaggctgaggcaggaggatcgcttgagaacaagagtttgagaccagcctaggcaacatggtgaaaccccatctctactaaaaatataaaaattagctgggtgtggtggcacatgcctgttgccccagctactcaggaggctgaggcaggagaatcacttgagcctggaaggcggaagttgtagtgagcagagattgtgccactgcgttccagcctgggcaacacagcgagactctgtctcaaaaaacaaaaactggaatgtgtttaccataaaggccagaaaatgtgattaacagctgctcaaagcccctgtctgccctaagcctgaaattttcaccgaaaaaaagatctgtaggctcatacagaggaaggacaaacaccagggaggctctcttccagtttgcttcacctcagcaagcagacggctggcagcaatttgggggcaggtgtgagcacctgcatcatcaggaaagaaggggcacggtggggacgcaggtcagacctctcacaggtcttggctctgcccaggagacacgtgtccaactgagaggtgaggaactgggttctgcagctgcagacacaggtgcggctcagcatctgatggccacggagaccccctggcttggcttctcccagctggtggcccatgaggagcttctatcccaagagactgtccctcaaggagcaagtgggaccaggtacccacaggacggagcctgggagtgaggcctgccctgtggtctggctacagggaggaagggcagattggagggggcaggacagcaggtcaggaattggccaactctggagagagcaagcaaggggaagtctgcgcacagggcagggctggtcaggggcgaggcagggcattggaccagtattttcagagctggtgaggcttaaagagcatgtctactgcctcttattacagagagaggatgccgaggcccagacccatccaggccacctctccacagacacagctggtgccagggaagcccctcccagagcctcaaggcattgctccctctctctctctctttttgtttttttggagacggagtctcactctgtctcccaggctggagtgcagtggtacaatctcggctcacggcaagctccgcctcccggattcacgccattctcctgcctcagcctcccgaatagctgggactacaggcgcccgccaccacgcccagctaattttttgtatttttagtagagacggggtttcactgtgttagccaggatggtctcgatctcctgaccttgtgatccgcccgtctcagcctcccaaagtgctgggattacaggtgtgagccaccgcgcctggactttttttttttttttaagacggggtctcactctgtcacccaggctggagtgcagtggcgcgatgtcggctcactgcaacctctgcctccccagttcaagtgattctcctgcctcagcctcccaagtagctagaattacaggcacatgccaccatgcccagctaattttctgtatttttagtagagatgaggtttcaccatgttggccaggctggtcttgaactcctgacctccggtgatctgcccacctcagcctcccaaagtgctgggatgacaggcgtgagcccccgcgcctggccccccgcagtgctgggattacaggcgtgagcccccgcgcccggcccctccctctctttgactcccttctttctcaccgccccctccccaccatccttccccttcactgacttcagggagttaaaaacaattctcgcagtgagctgggcttgttttgtctccctgcttctctttgtactaaacattagataccgaggaaatgcggattggcctttggatgattcatgagcaggagtcagaaaaaggcaccaggttggcctcaagcagcagggtatagtagtgcccgctcccagggtcacacctcacgcccacccctcccgccgtccaggtggatggtgcccactcccagggtcacacctcacgcccacccctcccgccgtccaggtggatggtgcccactcccagggtcacacctcacgcccacccctcccgtcgcccaggtggatggtgcccactcccagggtcacacctcacgcccgcccctcccacccacccgggtggatggtgcccgctcccagggtcacacctgacgcccacccgggtggatggtgcccgctcccagggtcacacctcacgcccacccctcccgcccgcccgggtggatggtgcccgctcccagggtcacacctcacgcccacccctcccgccgtccaggtggatggtgcccactcccagggtcacacctcacgcccacccctcccgccgcccaggtggatggtgcccactcccagggtcacacctcacacccacccctcccgcccacccgggtggatgcccttatcagctctccttctccttctctttcgtcttcttcgtcttcctcctcttctttcttctttttttttttttttagaaagagtttctactcttgctgcccaggctggagtgcaatggcacaatctcagctcactgcaacctccctctccccgggtcaagcaattatcctgcctcagtctcccagattgctgggatcacaggagtgtgtcaccacacctggctaattttgtacttttagcagagaggggggatttcaccatgttggccaggctagtctcgaactcttgacctcagtttatccaccggcctcagcctctcaaagtgctgggattacaggcatgagccaccctatctgcctcacttctacagaggaggaatgaaggctcagagagggcaagcattccacccagcatcacacagagtgccgggtgagagcccagtcatgagcctgggcctgactgcaggctcctgttgggagctcgcggaggtgggggatctgtccagaactgagaggccaggggaccacagtggcctctgacccctggagggccctggaggctgctgccggctccccccgggggcagatggaggtcactgtcacccaggctgcttctcatggtgccaggagcacagcatggcaggagccaccagccgatttgcctttccctgggcaggaaactcagaaatgtggctaccacagtcaggctgcttgacgtgcggtgagcactcatctcttagcaggcaagcggccaagcacctttcctgaaatattgaggcctcagaacaagccccaggagaggtgccagcaccgtcatctctacccagataaggagacccaggtcctgagaggttaggcagctcggacaacaccacacagctggaggaggtcagactctgggttgcagaaggagaatgtgagcagaggccacaaaagagcgaggagccagtgcccagatgccgagatgccctcgccctcccagctcagccccaggaaccgagcccatggggagggaccgtcagggaaaggctgtcaggaagggcaggaggcggccctggagaggacggcgctgccctcaggggcaggaggggagtcccctccgctgagagcccccccacccccagtatccccgggggtgtccaggaggaggcggagggaggaagcgcagatggacaggactcccagatagggtggggaggtgtggccggtgacacacacggtcccctcctggcaggtgctgaagtcacctggagcctccaagcccgtggggcctgaggggcggggtcaggtcgggcacgcgtgggtgggcggagttctgcgccccgggccaaggcgcccgagttgaaccagtcagctcgggagagggaccgcggcgacctgtcccgggggcgtaagaaaaggtgggagggagtgcggctcgtgaacgggggcggcgatgggaaggaggtgcggcccttcgtcctgtcctcccaaacgtcgagtgaaaaacgaagcgggttctgcggcctcgcggcggagcagagcgtttcgggaagggcgggcccagcgtcctcgcgcccgaggtcgcccggcagctcccctgcgtccagaatccgccccccgcccgggcctgcgcccgcccctccgcctgagctccgcgcgggacgggccgggaggccggggtgggcgctaccttcgaaggcggtgggtccgccccgcgggaggtggaggggcgggaggggcggagccctctggtctccggagggtttggggatcgcagtcgcccctcccccatccagaccccgcggcgcaaagggcagtggcttttctggccagagcaggtggcgcgggcgtcgcaaagggtggtccccgaggccgcagcggtgtggggggagggcgcggtccccctcactccgggctccgccgtgtctggcccgcccccctccttcagcgccccctccagcccctgtgctgcactggcgcggggagcgccgggttcccggctggggctttggcagagggtcccaccctctccccgcctccccacgaaggctctggcggacccagatctcgggtcgccggacgccccagggaccccgcccgcacatcgcgagcgcgcccacccggtcgcgagcccacgcccgggtctgggagccaccctgcggcagtcgcgccctgcgtggcacgctgctcccccaggggcgaggcgcccccgcccgacgtcccggtcccgagcgctccccggcgcggcgcctcgcagcccagcgccccaccagccccgccggcgccgcagaccccagcctcgggcgggtcgggcccaggcttgcaacgcgcagggtaggagaagggaaattggcgtccgctgccggccgctgccccaggcgaggccagacgaggcctctgctcagatcccgccgccccacaaagcccgtggccccggagcctaccggaaatggtgctggccatggtgctggcggcggttgggcctgcggaggctggagaggcgcaagtggcggccggagctgcagacggctggtgctgcagtgccggggaggggaggggagaggagtggagggagcgagggcgggcgggaggcgggcgcggcgggagagagagagggagggagacagagggagagagagagagggttgggggaaggagcggggggaggagggagggagggttgggggaaggagagagagagagagagagactgcgggggcgggggaaggagggagggaggaagggagggaggaagagagagaggagcaagcgcctggctgcggaaggggccgcggctctcagggggagagggcggaggaggggggctacccgaactgcaacaagaccccccaccctccaaccgctcacagcgggacagctgcttctccaacttggctttgtgaggcctgagagtggggtgggggtggagatgagcccccattccccagggcaggcggggcaggggcaatgccggaggagcaggtcccacccatggggtggggccgcagagctcttcgccgccaaggccgctgtaggctgggctggcgccaacagggtccaggtctgtgcctgccatcggagaggatgccacagccacaggggtgggcgctggcctggaggcctccaaggggcatctcctgtgagcccaggggatgggcaggatctgagcggagaagagtgaaagtggaggagtgaggccagaacaaaggctttgccgtgaaagaggtggtttcccgcctgggctcagaccttcactcactgtgtggcccaggccaagggcaagcgtctgacctcgctgggcctttgtttctcaggggtaagatgaaacaatgatgcccccagacgatggagaggaggggtgccagggttgtgcgcacttagtgagtggggggcaacctatcctgcctccccctctcctcataactcccaaagggaaagcctggtaggcaaacggagcgtctttgccattgcagggatgaagccaccgaggcagggagaaaagtgctttgccctacaagcaactaagtcatagggccaggagcaaaaccctgaaaacctcaggagacttgcagagccatgaggctggctcagcaacacaaaagccaggggcaagcctcagctctagcagtgcggtgggagcacccaaggccagtcacatcctagggtggcctggagagtcctgacccctgacgtgcaagccggcatcatccccgggactgtgagtctggtgggggtgatgcccaggaatgtgacattgtgtggcccagaggtacccttaagactggaggatcaccaggcgggccctgacctcatcacaggagccctttaaaagcagtttcctttgcctggttgaagaaatcggagggatcaaaccaaagaaggttttctgttgttgagatgagggggccacgtggcaaggatctgagaactgctcccagccaacagccagcaagacaacaagaccttaactgcaaggaagtgagttctgccaacaagaagagaatgggcttggaggcaggtttgaccccagggcctccacacaagaactgagcccaactgcccacttggtttcagccttgggttactaagaattaggaggtaatgaatgagagttgttttaagctgttggttttgtggtgatttgctatgaagccatatcaaactaatatacacacagaggtgttggcccctgggccattcctaggaagccagctctgcgaaggaggaagaagggcagagaggcacacagagctgcccaccacagcagctgtgtcctccctgttggccaccacagtagcagttggggatggtcagcatccttcaggcagactccagccccgggtgctggagctcaggtgctagggatcaagagaagtagccctctctgggacctccagagtcttctcatgtgggtggggtaggacccacccagtcaggctcagagcaccgcaatgcctcacactcattgtgactctggccaggccctctctgagcctctgtgtcctcatctggagcacagggaccaggtgtgtggaagcccgtggcatagtgccaggaacacagtagatgtgcacagtgtgcactagcaggaacacacaacaggggtactgactgtcagcacctaggcaggcacacgcaatggggtactgactgtcagccatactgactgtcagcgtgctagcaggcatacacaacagctgtactgacagcacactagcaggcacatgccataggtgtactgactctcagtgcactggcaggcacacgcaataggagtaatgacagcatgctggcaggcacacaatagctgtactgactgtttgccccaatatagtgccaggtcttggagcagattttgacttctcaccaagatcaaatgcagaaagtgcacgagcatttcaaagatgtttttcacatgcacattagtgctagttaaaaaaatgttttgactgggtgcagtggctcacaactgtaatcccaacactttggggggccgaggtgggcagatcacctgaggtcaggagtttgagaccagcctggccaacatggtgaaaccccatctaccctaaaaatacaaaaattagccaggtgtggtggcaggtgcctgtaatctcagctactttggaggctgaagcaggagaatcacttgaatccaggaggcagaggttgcagtgagccgagatcccaccactgcactccagcctgggcaacaatatcaagactccacctcaaaaaaaaaaatgtttttcataaagtgtgacttttatcagacctctgcattcttgaaattaactctggcttggctgggcgtggtggcccacacctgtaatcttaacactttgggaggctgaggtgggcagatcacgaggtcaggagttcaagaccagcctgaccaacatgatgaaaccccatctctactaaaaatacaaaaattagccgggcgtggtggcatgcacctgtaatcccagctactcaggaggctgaggcaggagaatcgcttgaacccaggaggtggaggttgcagggagccgagatcgcaccactctattccagcctgggcgacagagcaagactctgtctcaaaaaaaaaaaagaaagaaagaaattaactctggctcctagaaggagccctatatctcagcaggacactcagtcattcaacagacatctgtcaagcacctgctgtatgctggagctgtgggtacgtcagcaattagaggaagagggcaggggtacaggagttcctgaccaccccaggccagcacgctcctatagcagctggcaaggagcagatgactcagacttcagctcagtccacaggacagccttttctggccactgctctcaggagatgagatgtgtggctgcaaaaggtaaactcctggctcctgagcaggctctgggcaatctgctcaacgctctgtgcctcactttctcacccagaaagtgtggacaatgagaggacttatctggctgggcgcggtggctcacgcctgtaatcccagcactttgggaggccgaggcgggtggatcacctgaggtcaggagttcaagacctgcctggccaacacggtcaaactccatctctactaaaaatataaaaaattagccgggcttagtggtgcacacctgtaatcccagctacttgagaggctgaggcaggagaatcacttgaacccaggaggtggaggttgcagtgagccaagattgtgccactgcactccagcctgggcaaaaagccaaaactctgtctcaaagaaaaaagaatcatggcagaaggtgaagtctatgttagtcccagttcccaggtcgtacatggcggcaggagaaagagagagagaaggggaaactgccacttttaaaccatcgggtctcctgagcactcactgtcagaacagcctggaggaaactgaccgcatgatccaaccacctccctccaggtccctccctccacacgtggggattacaattcgaggtgagacttgggtggagacacagagccgaaccatatcagcatgtatggggggcactgaaacttgtgcttggtgcccattcattcaacgagtgtgtgtggctggtctcctcatcttcaactccctgccgagtctcagataggcagcctgcagttccttcaccacaacaggcacatggggctgggtgccagtgagtgctggggcttctccgagcactatctcacacccaggagcgtgggcacgcatggcattcgcatgtgccgtcagtggacattaaacacagccatgaagaagccacgaagaagtgctgcctgccggccgtgcgcggtcacgcagcgccaactccctcctggggccttctggggccttctggggcatgggagctggggccgcctgagacaaacatccgtgacgctgggctgaccccacagaacggtgcgggcctcgctcttggagtcagccctgctgccagccagtgccgggtgctggggactcagggaggcccgccgggaccactgcgggacagtgagccgagcagaagctggaacgcaggagaggaaggagagggggcggtcagggctctcaggagccgggtcctgggcaaggcgcagccgttttcaaattttcaggaaagcggtcggctcacactcgagcagtaaaaagatgcctctggggaggaggcccgtgcagctctccgggcaatggtggtggctcggcctagagaggcggtagtggaacgcagaccctggtgggggaatgacatcaagggaggagacgggcgggaccccagatttctgcctgtgggcgatggaagtgaggttcactggccagcggagccggacacagaacgcgcaaaacgccgtgtaggcctggaggagccgaagagcaggcggaccccctccgcgggggaacagtttccgccgggagcacaaagcaacggaccggaagtggggggcggaagtgcagtgggctcagcgccgactgcgcgcctctgcccgcgaaaactctgagctggctgacagctggggacgggtggcggccctcgactggagtcggttgagttcctgagggaccccggttctggaaggttcgccgcggagacaagtgagcagtgagtcgcagtgaccctacaagtggttcttttacccgagcggctcgtaggcgcgttgcggtttttcgaaactacagctcccggcaggccccaagccgccctcggggccgcgggtcggcggattggccgcgctgcattttgggacctgtagtttcctgcgctcgtggcgctggcgccgcggcgttggctgagcccttgaccggggctggagggaagggccgacattcagtgtgtccgcgtctgttctgttagtcccagttcccgggcgggattgaggcttagagaagttgagtgatttgctgagggctgcacgggttggcatcccggcatgctctttcgctactttggctgcatctggttgcccacccgggcggatggggaatggactccagccagccaggagggcagagggctggagaggcagggccggaggttcagaccctccgctctgacgttgcgcctggtgaggccgggaggggtgccgcttgcctcttcagccctcacgctcttgtggaagtcgcggaattactgcaggcggaacttgcagcactgtgggcgtcttttccagagaaggacggagttgtggggcgggaggataaggcaaggcccagccacttcgcatcttcgccccgccagctcctcgagatgggatataccagggttgctctccaaccctctccgcaggagggactgatggaaacgcctgggaaagtagcccggtacccacaaaggctgtctacaaacagagtcttactgtctttcccaggtctgtgccatagggattctcgaagagaacagcgttgtgtcccagtgcacatgctcgcatcgcttaccaggagtgcccgagaccctaagatgttcggagtggttttttcgcacagacccgaatagcctgcccctcagccacgctctgtgcccttctgagaacaggctgatatgcccaagatagtcctgaatggtgtgaccgtagacttccctttccagccctacaaatgccaacaggagtacatgaccaaggtcctggaatgtctgcagcaggtagagcacaggccccgaggaaaggactgcgggtgggtggagcttcagccaggacggggtgtgcttccctctcccggcccattccagccaggcccctccgggccagaggcagcgtctgtcataaaaagggctggtgttccaggtggggtcagagagaggattgacaagtaaaaacgatcgtcctttgaagggggccggcccctccacacctgtgggtatttctcatcaggcgggacgagagactgagaaaatgaataagacacagagacaaagtatagagagaaaagtgggcccaggggaccggcgctcagcatacagaggacctgcaccggcaccagtctctgagtttcctcagtattcattaattactattttcactatctcagcaagaggaatgcggcaggacagcaaggtgatagtggggagaaggtcagcaagaaaacgtgagcaaaggaatctgggtcacaaataagttcaagggaaggtactatgcctggatgtgcacgtaggctagttttatgcttttctccacccaaacatctcggtggagtaaagagtaacagagcagcattgctgccaatatgtctcgcctcctgccacagggcggcttttctcctatctcagaattgaacaaatgtacaatcgggttttataccgaaacattcagttcccaggggcaggcaggagacagtggccttcctctatctcgactgcaagaggctttcctcttttactaatcctcagcacagacccttcacgggtgttgggctgggggactgtcaggtctttcccatcccacgaggccatatttcagactatcacatggagagaaaccttgggcaatacccggctttccagggcagaggtccctgcggctttccgcagtgcatcgtgcccctggtttatcgagactggagaatggcgatgacttttaccaagcatactgcctgtaaacatattgttaacaaggcacgttctgcacagctctagatcccttaaaccttgattccatacaacacatgtttctgtgagctcaaggctggggcaaagttacagattaacagcatcttagggcaaagcaattgttcagggtacaggtcaaaatggagtgtgttatgtcttccctttctacatagacacagtaacagtctgatctctcttttccctacagtccttgagggtgacagacttaggagtgccttgggggcctctctgaggagcagctgatattcacgggtcaggaggaagcatttccattagaggggcagccggtggccagcctcacttggaaggtctttgaacctcgggggtgcagggaggtggcagtggtgcaggttgccttctcctgggttccttgaggtgccctcttgtacccggctcacacccttcccctccccgagtttcctgctcaggttcccgtctgagagcttgtatgtaggacgtcagataggacagcataaatgtttggatccagaaacgcagaacagtttcctattttgagacttgacacctaattagtcatcttactatttaagctgaaaaatagtgtcgtgttttgggtaacgttctgcaaatcgtttgctaatggcggctgagttgcttcacgccctttagggcaagagtgggacttgcctgtggacttctccgcggtcccacagggctctcgccacctggcagtggcctctgcatctgcaaagagctgcccgctggctgccgaagcttgtctcagggcagcttgtgtggcctcgcctcttcctggcttccccgtaacccttgctccgaactccgttcagaaggtgaatggcatcctggagagccctacgggtacagggaagacgctgtgcctgctgtgcaccacgctggcctggcgagaacacctccgagacggcatctctgcccgcaagattgccgagagggcgcaaggagagcttttcccggatcgggccttgtcatcctggggcaacgctgctgctgctgctggagaccccataggtgaccctagttcccaggcctctcctggcctcctgtggggatggttggcaagggatggcgctgagggtggggtgggcccatggggactcctgccgtctctcaagcagaactcaaggagaattttttagctgctgtataatttctcgccatcgtgggtgtaaacctagggttgggcttttttgctgaattagggcacggcagatgcccacttcacccatttttgataaaccagtatctggggtgtcagattcttggctgtctgcagggccgagttagccgaatgccacctgcctttgatacgtgagaacgttgtctgagaaccgtgacttctgtgcttgcttgtgtctggtcagcttgctacacggacatcccaaagattatttacgcctccaggacccactcgcaactcacacaggtcatcaacgagcttcggaacacctcctaccggtgggtcagacgagtttacacctgtctcggggtcctcaagagaaccagcttggcatggtgctgagtccacagccccatgctgtgctgtggtggagggtggtggtctttctagacgctcccccgaagtgtgcagagcgctggtgcccaggggtggggtgcggcctgggctgcctccaatgcccattacttgtgaggaagcagctttgcatctgtgtgctgaccttgggcgggcgtcctgagctcctcgcaggtgctgttgtagcagctgtgcagtaggtcagggctggcccccagtgcagctttgcacatgaagtaggaggaggccctgctgcttgtcagagcccagcagagtcttggtgttctgtcgggttcctgtggccggaccagtggcagggtgctgtggaagctgtcgaatctcctccctctgtccagtacccccgctcgtcttctagctccctcctacgcccgggccacgtttcagttatgctcacttcctctgaccgccgaggctcctgcgtgtctccatacagctcacgctgcagggccacgctgtgggtgttggagacagctcctcctcgacccacggtgctctctcccaccaggcctaaggtgtgtgtgctgggctcccgggagcagctgtgcatccatcctgaggtgaagaaacaagagagtaaccatctacaggtaggctcctgggctcccgctccggctcagtgtccgacaggcgagtgctgctgggtgtccagagccccaggctgcgctcccgctgggctagggtttgaagttcactgggggactgcaggggaggacctggtgggggtggggactggcttcggtcctttcttggccgtgcttcagctgcgcactctgcccttcctcccacagatccacttgtgccgtaagaaggtggcaagtcgctcctgtcatttctacaacaacgtagaaggtacaagcagctgggtgggaccagggtcgggttggagtgtgtgcagcctctcagggtggagctcagtggtgtcacagcctggttgtgcttgcccggtggggcggccagtgcggccatgtacctgggccctgtcttctgactcggggccacccatgttagacttctgtgtggaagagctcacacagtggtctgagacagccagccggcaagactgcctctggctggtgcctggggccttggattttgggaaggctccctccatttcctgatgagagggtctccctgcacctaacctgctggtgcaaacagtaggggttttgctgaacaccggctttctcttcggggactttgttgcttgcccagcagcaggtgctccagtgaccggccctcataccatcttgggagggtgtcctggaagccgtgtctggcctcccgcgaccctgccccgtgtgtctttttcctgtgctgaccttgctgcggaaaattatggccctgagtgtgactccaggctgagtcctgtgggtccaacacgggatgccttggggcctcttctggagacgggatgtgagtgacaggagccggccggggcagcttgccctgtgactgcacgtggccacagcctgtgagggccgggggtgcttctccacccacgtggctgcccctcgggtatgtcaagggcttctggggctcatcacggggtcctagagacagtggcagggtgcacccccgttggctgcccttacagtttctgtgacctgagggtggcatctgtgcagtcggcgcggtctgtgcttctgtgggatcagggttccctctgtttcctgcctcagttggggctcaagcctcaggtgaggtggccccggagcactcagaaggcatcggcggtcctgtgggctgctttctgcactcacgtttgctgagtgctcagtgtgccaggactgaggaccctgaagctgctcttgtatttagggcggcgctcccctggcagagactgagccaggtggtcccgcatgacccactaccaggcgtttctgggccctggcccttggagggacagggtgggcggaacatgggcctgcagggaggctcccgcttactggaggcatgtgctgtgttgctggagacatcctctgtgttgcttcttgttcgctgtggtttttggtctggtggcaccaaggaccctcagtcatcttgatgtgtggttgtccaggcctttttgttggtcctaagaaggggctctgcctttgtgcccccaggttccctgacaggagctgccggctcgtcccggtgatgcctgcaggacgtgactctgggacggggggttgggcagatgtgctgatggaaattctcaagcaggcgtcatttccgaggtcctcacctggatttccaggacaggagtgcctgctgggtgtccccagtcccatgcagcgggggtccttgggatagcatggaacgctgagcatgggcctggccggccgtggtcctggacaagggcagtgccccggtggctgctgggcctgggacctggtggggacgctgggcctggtacctggtggggatgctgggcctgggacctggtggggaggcctctgactgcctcctggtgctgcttccgtctgtgttaggcctctgggtattggggcccccatctgtctcctcctccaggcctgtggactcagaccaggaagacacaggccagcccctgcctgtcccccttggcttgggctctcactgcccgacctggcgggaggttgcctagccgtgaaccttcgcaccctgtctgccaccggacaggctgtgagggggtgtctgcagcacctgcaccggcctgagcatcttcagagtgggctgcagctcctggaggggtctgagaggaagggaggcaggtattttgggcgaatgaggagacagctggagagctggcacccttcctggcctgcgtcctgtgaggactctggttggggacagcaagcttggggtcagcctggggcagagcctctgggacggccccgcccctcgtgccccttcccctcgcagctcctgtcctcgccccgccctcagctctccgccaggcaaggtttggcaagtgccgctgtgcggcagtgcctgctgattggctggtctgttgctatggtgctgcccaggggtgtgcttttcctcccctgccttccctgctatccctgggagtatctggggttgggtcatcgctggtgtgtgtgagtgtgtgtgtgtgtgtatgtgcacgtgtgcatatgtgtgcgcttctggcctctgcagctgagtcctggccctcggggggcctggcacctcctggggacaggcacaaagcagccatgatggagtcgggagctgggggaggccccattgccccacgtggctgccctgtgactctggggtgcttgttagaagaggtatctggttctgtctgtgtttaagcaactccctaaggaattcttgtggttccagtttggggggcctgtactgtagaggcaagggaggggcaggacatcccccagactctgacttctgaagccttttctgcccggggcctctccgccagtacaggcagtgtcctttgccagggctgccatgctgcagaggggagtgggccactgtttagcccaggaaaacctggctctcccttagctggaagttctgggcctgttgtggttggcagggaagctgagtgacggtgctaatcacaggggcacctgcaggggtttgtgggagatgcctctgtgggttggggcgataggctgaggggctgttcttccctgccctgaggagggctgagtgtagccgccactcctgtcctgtcttgggctgtctcggagaggatgcgtagaaccctcgggatcctgctggcctccgtctggtccaccctgaacctcaggccttctgggggcagaggaggattccctcaggatcactcgggtgggggcctctcttgggcacctgagaccctcagtgggtgctttgtggcgcgttcacggttggtgggggacgcccagccctgcccgccgtgtaggagccgttctgtcctgggcatccccctgtggtctgggacttagtggaccctgagggtgtgtgtttacccctgcctcacacctgcagaaaaaagcctggagcaggagctggccagccccatcctggacattgaggacttggtcaagagcggaagcaagcacaggtgagacccctcagtgaggccacgaccactgtccttccatggcccagctctcctgtgacctgtggaggcccggatatatttcttcacttttctttgttcctttttaaattatgaaactaaccaccattcagtacgaaaaagtttaagcagctctgaggaagatagagtaaaaaattgtctccctcttccctggccctcagccatccccggtggccaccgtggagtgtggacggagccctgcaggcctgtgtctgtgcggaagcacgcgcagttttgtctgcacagactgtcctgcagttggctgttttcactcagcgttgtgggtatagcttcccatgctggtgctggcagctcggccttgttcttttgaggacagcagatgtctcctatgtctacctcttacagcttcagagattcaagttataataaagctcttcttatattgagggggaaacctccctcccccttttttttgaaacagggtctcgctctgctacccaggctgcagtgcagtgtcacagtcttggctcactgcagcctcagcctcccaggctcaagcgattttcccacctcagcctcccaagtagccgggactgcaggcacacaccaccatgcctggttaatttttgtattttttgtacagacagggtctcactctgttgctcaggccagtctcctgagctcgagagttccacctgccttggcctcccaaagtgctgggattacaggcgtgagaccccatgcctggccagctctttttttttttttttttttttttgagacggagtctcgctctgtcgcccaggctggagtgcagtggtgcgatctcggctcactgcaagctccgcctcccgagttcacgccattctcctgcctcagcctcccgagtagctgggactacaggtgcccgccaccacgtctggctaattttctgtatttttagtagagacggggtttcaccgtgttagccaggatggtctcgatcttctgaccttgtgatccgcccacctcggcctcccaaagtgctgggattacaggagtgagccaccgcgcccggcccagctctgctttttcttagtggttctgcgttgtgtttgtttctatccaggaatagggttggttttacttttccatcgagtttttaaagagacgacgatttacatggtcggaaactcacgaggactccccatcccttggtcggaaactcacatggactccccatcccttggtcagaaactcacgtggactcccatccatcccaggcagcagcttcccacctgggccctacgtgcaggatgagggctccttccgggtcagaagacatggcggcctcggggcaccgtcccctgcatggggtgctcacaggatcttctcctctctccttcccagggtgtgcccttactacctgtcccggaacctgaagcagcaagccgacatcatattcatgccgtacaattacttgttggatgccaaggtgggggctcagtcctgtagctgacgactcctgatgtccaggggtgtccctgggcttgggaacagctgtccgagcctttgctgcttcagggccttagatcagcaggcctgggtgggaggactcacctctgtcactgggcaggggctcaacctggccagacacacttgtgagcagccccaggccacaggtcagttttctgagcagtctgggagcgggcaggctggtgggagtgaggagagacctccaggctgtggtccataggccagtgcccgctcttgatcctgacagctcaggttctctccttcacgtcaggccatgggaggcaccgagaacacaggaagcccactgactcccctcttcccagcgcgtgcccggccccacactcactccccctcccagcatgtgcccggcttcacactcactcccctcttcccagtgcatgcccggccccacactcactccccccacagcatgtgcccggcctgacactcactcccctcctcccagtgtgtgcccagccccactcccttccgccccgtgtgcccagccccacgctcactccccccgccagcatgtgcccggccccacactcaactcccctcctcccagtgtgtgcccggccctgctgccctcctccccatgtgccctgcttttgtgccccacactttttacttagtgcaggtgggatcacacgccacgggtcaatggtttgtgtgttcacgtgacgatggcgtggtgacgtttccagatcccgtcgttggttcgctcattctcggggtgtatatttattgagagctcatcatgctgggtgctattccaggcatagcaagactggcttcactcacatggagctttgattctagtggtggggacaggtggacagcaaaagagtaagcacgtgagctgatgatactgaagggaaatagagcagagggaggaggcggagaccgagccaagcgggcccaagtgcgatgtcggcgggaggtggggaatgctggtgggtctgaggggagcctcagcaggtgcagcagagcaagggaagaggtgagtgggggcggctggggggccgactcctgggaagctgtagcagaaccccacagagagctggtgaggtttgccgtggttgtgggtgactcggtgctttgagccctggctgcccctgggaaccatctggagagcttctaacccaaccaggcccctccctgggacagttatatcacagctggtaagccgagtctaacactttcacggaaacgcagaagatctaaaacagcaagatgaccgtgaagaagaacagagctggaggactcacctcgctggtttcaagactcctctaaagctgcaggagtggaggtggagatggcccagctcaggcacaggcctgcaggccatggagaaggcagcaagctcaagctgacccacacgcatgtggtcattgttttttttttcagttggaatctcactctgtcacccaggttggagtgcagtggcaccatctcggctcactgcagcccccgcccctaggttctagcgattctcccacatcagcctcccgagtagctgggattacaggcgtgcgccaccatgcctggcccttggtgattgttttttgacaaacatgccaatttaattgagagaggaaatgaaggttgatttctggttttctgaaaaaatggtgctaagaacagctggatatctgttcggaaaacagtgaatcttaactcttgttttaccctgtataaacctaaatgtaaaagctaaactaaaagttatagaaaggaacatgggggaggtctttgcaactttggggtaggcagagatttcttagtatggatacacaaggcactagccatgaagaaaaacattaaaatttagacttcaccaaaatttaaagcttcaactctgtggaagagttgagaaaatgaaaaagcagttaaagaaagggagaaaatacttctttcaaaggacttaaaaaattttttcagccctcctctgatttgaaaggacctttgaccagagtatgtaaaattctcccataactaagcaaacaacccacttaaccactgggaagggatctggacagacgtttcaccaagatgggtggaatggccagttaaccactgggagagcatccggacagacgtttcgccaagatgggtggaatggccagttaaccactgggagagcatccggacagacgtttcgccaagatgggtggaatggccagttaaccactgggagagcatccggacagacgtttcgccaagatgggtggaatggccagttaaccactgggagagcatccggacagacgtttcgccaagatgggtggaatggccagttaaccactgggagagcatccggacagacgtttcgccaagatgggtggaatggccagttaaccactgggagagcatccggacagacgtttcgccaagatgggtggaatggccagttaaccactgggagagcatccggacagacgtttcgccaagatgggtggaatggccagttaaccactgggagagcatccggacagacgtttcgccaagatgggtggaatggccagttaaccactgggagagcatccggacagacgtttcgccaagatgggtggaatggccagttaaccactgggagagcatccggacagacgtttcgccaagatgggtggaatggccagttaaccactgggagagcatccggacagacgtttcgccaagatgggtggaatggccagttaaccactgggagagcatccggacagacgtttcgccaagatgggtggaatggccagttaaccactgggagagcatccggacagacgtttcgccaagatgggtggaatggccagttaaccactgggagagcatccggacagacgtttcaccaaggtggatggaatgaccagttgagcacatggaaagtcgcccagcatctccagtcataggagaaggcagattaaagccacggggagccgacactgtggtcccactggcatggctgaaattcagaagccctgagtgtggcatgaggatgtggaacagctggatctcatccatcgctgtgaagttgtgtagccactccacaaacgtgtggcaaacagccgagccgggagaagggaagacgtgttcaaagattcatatgtggccaggctcagtggctcacgcctgtaatcccagaactttaggggccaaggctgggggatcgcttaagcccaggagtttgagaccagcctaggcaacatagggagaccccatctcaaaaaaaaaaaaaaagaaaaaagaaaagacttcagtgtgcaggtttaccagagttttgtttgcagttgccaaaactgggaagcagcccgcgtgagcccatccacaggtgaatggacagaccgtggtacccgaacactaacagcagccacgggcgtggactgtggtcacacagcagcagggagccgatgagtctcggacatgctaacccagagaggcccattgaggaggacctactgttttttgtgtttttgttttttgttttgaaatggagtctcgctctgtggtgcaggctggagtgcagtggtgtggtcttggctcactgcagcttccgcctcttgggttcaaacagttctcctgcctcagccttccgagtagctgggactacaggcacccgccaccacacccggctaatttttgtattttcagtagagacggcagttcgccatgttggccaggctggtcccaaactcctgaccttgtcatccactcactttggcctcccaaagtgctgaggttgcaggcatgaaccaccgcacccggctggacctactgttttattccatttatgtgacactctattaatagaaaaggcaggggtggggctggtggttatatggtgcacataactgccagaactcagtacacttaaaatgaacatcttaatgtgtgaaatttttttttttgagacggggtcttgctctgtcacccaggctagagtgcagtggtgcgatctccactcactgcaagctctgcctcctgggttcacgccattctcctgcctcagcctcccgagtagctgggactacaggcgcccgccaccacgcctggctaattttttttttttttttgtatttttagtagagacggggtttcacagtgttcgccaggctggtctcgatctcctgacctcgtgatccgcctgcctcggcctccgaaagtgctgggcttgcaggcgtgagccaccatgcccggccaatgtgtgaaaatttaaaagtaccaaagctggaccccaccccagattgctcccatgacactctgtgggtgggacctgggagttgggttttgttttgttttgttttgtttttgagatgaagtctcactctgtcgcctaggctggagtgcagtgacacaatctcggctcacattaacctctgcctcccagatgaaagcgattctcctgcctcagccttctgagtagctgggattacaggcacacaccaccaccccctgctaatttttgtatttttagtagagacggggttttaccatgttggccaggctggtcttgaactcctgacctcgtgatccgcccgcctcggcctcccaaagtgctgggattacaggcgtgagccaccgcgcctggctgggagttgggtttgtaaatctccctgagtggggctggggcagggaactgctgggtctgggtcttcctggctcctctggtctgtggcttcctgactgcggtggccgggggctcccagggcatcgtggccgtctgtcttgctgagcgtggcacgtgcctttccatgctgtggaggagcgtctcccggtatggcgaactgctggttagggtggggcggtgttgccaggtcatccaggtctggcctctgctctcgacatcgccggcgctgttgctcatctgcgcttgtgatgttcgatgcctgctgcacatgtcttggcttccctctttcccggcctctgtgagctccagcgctgcgtcccttctcttcctcctgtagagccgcagagcacacaacattgacctgaaggggacagtcgtgatctttgacgaagctcacaacgtggtgagtctccgctggcctcctaaacacctcctattgcttctggcctttttgtcaagagccacgcaaacctttctggaggggctctggccaaactcctgaagccctaggtgcccaggactggggactgagcacaccaggagcttctgccaccccctcccgccctgatccgatgcctctgctggggctggagactggccagctgggccagggacctgcccgtcaggcgcagggcccccacaggccgctcaccagaccctttccctccagccagctcggggtcagcctgggccagggctgtctcctctgccctcggcagcagcaggcttgtggtcttgcctgcagtgtctctgcccttccggccacatggcttgagactgaggcaggagaatcgcttgaaccttggaggcagaggctgcagtgagccaggatcacaccactgcattccagcctgggtgacaaagcgggattctgtgtcaaaaaaaaaaatgttgactgggcgcgctagctcatgcctataatcccagcactttgggaggctgaggtgggcggatcacgaggtcaagagatcaagaccatcctggccaacatagtgaaacaccgtctctactaaaaatacaaaaaaattagctgggcgtggtggcgtgtgcctatagtcccagctactcaggaggctgaggcaggagaatcactcgaacccaggaggtagaggttgcaatgagccaagatcacaccactgtactccagcctggtgacagagcaagactccgtctcaaaaaaaataaaatcaaaaagaataattggcaattccagtgaaataattgtttgtttgtttgttgagacagggtctccttctgtcgtccaggctggagttcagtggtatgatcttggcccactgcaacctccacctcctgggctcaagccatcctcccacctcagcctcccgagtagccgggactacaggtgcacaccaccacgcccggctaatttttgtattttttgtagaggcggggtttcccagcgttgcccaggctggtcttgaacccctgagctcaagtgatctgcccaccttggcctcccaaagtgctgggattacaggtgtgagccaccgcgcccggcctgaaacaatcgtttctaaatattggtgtgggccacacagtcatgtttggacctacttgtggccttttacagaccccaggccaaggctttgggaacttggctgtcagcctcctgtgccttctgcacccccaccccatttctgctttctggaacccccgatcctgtcctgttctgtggtgattcgggtgtgcttgggctctaggagaagatgtgtgaagaatcggcatcctttgacctgactccccatgacctggcttcaggactggacgtcatagaccaggtgctggaggagcagaccaaggcagcgcagcagggtgagccccacccggagttcagcgcggactcccccagcccaggtgcgttcatagccagactgcttggtcctgaggcctgcgctgctgcagggtgagccccacccggagttcagcacggactcccccagcccaggtgcgttcatagccaggctgcttggtcctgaggcccgtgctactgcagtgggcagcctgccctgtggctgtgtgtggtcggcctgggcaccatctattcaggctggcactgcagggcatccgcttctctcagaggcttcttgggtgtgaattcttcagggtcctgtagcctgtggaagggctggtattgttcagtagttctggtattttccaaagacctatgtcttctcccagccagtatcaacttggcctctactgtgtaaaactggaaaactctactttgtgaagctgagttgggagcatcgcttgaggccaggagtttgagaccagcctgggcaacatggcggaacctcgcccctgccaaaaaattagccaggtgtggtggtgtgctcctgtggtccaagcttttccggaggccgaagtgggaggcgtgcttgagcctgggaggcagagcttccggtgccccagatgactccactgcactccagcctgggcggcagagtgaggccatctcaaaaaaaaaaaaaaggaaaactaaatatattcactgtaagggcattttgcatctttaaatgacccacaaatctggcatgcatcagctgctctgcctgtaggttccttcccagtgtttgtccagaggtgtatttccacacagcgctagtcacggcatacgtggaaaacgtggaaacccttcatggatgttgtcagttggtctatattttctttcttttttttttttttgagatggagtttcacttttgttgcccaggctggagtgcaatggcgcgatcttggctcactgcaacctccgcctcctgggttcaagcaattctcctgcctcagcctcccaagtagctgggatcacaggcgtgcaccaccacgcccagctaattttgtatttttagtagagatggtttctccgtgttggccaggctggtctcgaactcctgacctcacgtgatccacccgcttcggcctcccaaagtgctgggattacaggcgtgagccgccacgcccggcctttgtccatattttctacatggcttctgtaaacagctgactaggagtctgtgtgaatatcttcataggttctgctgtgacactacttgctcgtgagcatctccaggtgtaaacagcatcagcttcccccattttcctttaaaatcgcacatgtggacggacaccacggggaccctggaccctggggagccccgtcctcacccttctcaccaggatggctgcttggtagagagtgagtttgcaaagttggcatttgtttagtacagaagttatcaggtgttctggctttagaatccctttatatatatatatatatacatatatttaagtgacagggtctcactctgttgcccaggctggaatgtggtggtacaatcaaagttccctgtagcctcggcctcctgggctcatgggatcttcccgtctcagcgtcttaaagcgccgggaccacaggtgtgcaccactgccaccggctctcaagattgccacgcagggagttgcagtgggggaaggggttcctgggactttgaacgctccacctccctcctctccacagtcccccaaccccacctctctaacggggtggacggccgcctctttccatccttcgcttggcgcagggtggggagagtgacaggtctccttccctcatctcggcagctgccatttcatcgcttacataacgtgggagaaacatccacccacccccaggcctgtgtgaacatcaccacggggccttctccactcttcagttttgttagttacttgatgtgcagggctttttgttgtaactagtgggggacgtgtggtggggtgggcttctgccatctcattcaggaccagaacttcagttttcatccctatctgttcccccacccctttggagatggggtctcactctgtcacccaggctggagagcggtggtgccatcacggctcactgcagcctccacctcctgcagcctccacctcttgggctcaagtgatcctcctgcctcggcctcccaagctcctgggactacaggcgtgtgccactgtgcttggcagggtccattcttttcctcacactttatttattgaagagcccaggccgtttaccctgcagagtcggaatctgtacaggaggggcagccacacgagttccccggtttactctgaacttaggtggcttgagggccccagttagactgcggccaccgtttgccgggctccagatgggacgtcctttctatcagaaggctcacagtatctcctttcccgtttcttcccatgtgaacattgttgctgctgaacacctgaatatgttaatcactgggggcttgcaagatggcagtgtgctaattccatcatctagtcagttagcaggaataacttaggaccacgccctgcaccatatcagctatgtggtgatcccattcacacaggaaaggtgggacaaatgctgggggtgggccgggtgtgctgtctcacacctgtcatcccagcactttgggaggcccaggcaggcggatcacgaggtcagagattgagaccatcctggccaacacggtgaaaccccgtctctactaaaaatacaaaaaaattagccaggtgtggtggtgcatgcttgtaatcccagctacttgggaggctgaggcaggagaatcacttgaacccaggaggcggaggttgcagtgagccgagatcgcaccattgcactccagcctggcgacagagcgagactccgtctcaaaaatcaatcagtcaatcaagtgtcatcactgaatgtttgtgtgtgaacgtggggattggtcctgccccatgctccctcctgaatctcactcctgacctcagttgctgcaccttgaggtgttttcatgtgggctcttgtgtcctgaccccggcggttgtggcctctttgctgtctgggagtcaggatttttcacactcatgtcctgctccagacctggaatcagccaagtctccaagaagccctgctttcttttcctgcaagacggtatttcaagacccgccatgcggcagcgggttggtcatggttactgggttggtcgttgttactgggtgttttcgtggagatacagccatacgcacaggtgtgttcacaaatgttaattctaaaggtcaaacacccggccaggcataagggctcagcggtaatcccagcactttgggagaccaagactggtggatcacctgaggtcaggagtttaagaccagcctgagcaacagggtgaaaccccatctctactaaaaatgcgaaaattagccgggcatggtggcgcacacctatagtcccagctagtcgggagacagacacgagaattgcttgaacctgggacatggaggttgcagtgagcagagatggcgctgctgcacccctgcctgggtgacagagtgacaccctgtctcaaaaatgaatagataaataaagataaaacacctgctcctcttggtgtctccagtttggatttggcctgtgtagcctcttccttcgcctgttggtggatttggcctgcacggattctgtgtggcctcttccttcccctgttggtggatttggcctgcacggattctgtgtggcctcttccttcccctgttggtggatttggcctgcacggattctgtgtggcctcttccttcccctgttggtggatttggcctgcacggattctgtgtggcctcttccttcccctgttggtggatttggcctgcacggattctgtgtggcctcttccttcccctgttggtggatttggcctgcacggattctgtgtggcctcttccttcccatgttggtggatttggcctgcatggattctgtgtggcctcttcctttccatgttggtgtccttttttccatgccaggaatcctggttctcaagggcggggttgttggcacgagcgtgatgcagactgcctttgctgcctttctcttgcccagggctgaacatggagctggaagacattgcaaagctgaagagtaagtgttgccctccccgcctccttgcagctgggtggggcctcctccttgcgaggaggtgggtgacacctcctcgacccacagtgatcctgctgcgcctggagggggccatcgatgctgttgagctgcctggagacgacagcggtgtcaccaagccagggaggtgagaggcggggagccagccccttcactgcaggcccagcctagagctagaaacgggccatggtgcagtcctgggctgtcacatcacgagtgaggcctgttttcaggcctgttttccctttttgagacctgggaggagcacctgctttgcatgatctggttgctgagatgttgagaggagcagcacacactcccacgggacagcacacagccccccacggaacggcacacacacccatggaacagcacacacactcccacgaacagcacacacactcccacgaacagcacacacactcccacggaacagcacacacacccacggaacggcacacacacccacggaacagcacacacactcccacggaacagcacacacacccacggaacggcacacactcccacggaacggcacactctcccacggaacagcacactctcccacggaacagcacacacactcccacggaacagcacacacacccacggaacggcacacactcccacggaacagcagactctcccacggaacagcacacacactcccacagacagcacacacacacccacggaacagcacactctcccacgcggggccgctgggtttcctgcagtttctcctcctccaggcctttccctggaccctggtccagtccgtcatttgagcacaggtgcctgttagaacgagaccttcttgttaggacgatgagtgtcccagccaccacctcttttggactccgggaggcctggaacgttctgaacgctccgtggggctccagtcttctccgcagccagggcagcagggtttgctgtctgtcctgcaggcagatgaggagtcagggctggggcctgtgtgggggctctcctgagcgcacagccgccgaggtggagcgtgttctgcctgagcgccgacctggtcgggggaatcccagttgcttccaggtggagccactgtcctcagcgtaatgctcaaggctctggcctggctcctcggccaccctgcaccctcagggtcccctcctgtagcttctgctgccccatcactgtcactctccaaagctttggggactctgcccagagccaccgcctcccagaagcccctgacaacctcttgacgaccccctagtgaccccatccctcccctctgacggcggcccctgctctgaggcggcttcttttcctcggtgctgttctcgtgctggccaggcctcctctccccacctggaggctcctgagggcggaggcctctcacctccaatgctggcgtcccctggagggctgaatttgtttccgagggaaggaaacttccacagttgttgccttcagttccaaagctgcagcctgatttccccctccaggctcgagcctgttttcttctcggcagctacatctttgaccagtgtcgtcccccctcaggcccgagcctgccttcttctcctcagttcccaaagctgcagtctggtccccccgccaggctcgagcctgccttcttctcctcggcagctacatctttgagctgtttgctgaagcccagatcacgtttcagaccaagggctgcatcctggactcgctggaccagatcatccagcacctggcaggacgtgagtgctggcacggggtctttggtgcgggcaaatgtggcgtagggggtgcagcaggcctccatcttggcagtcagggctcccctggccgtcacctggccgtcagcaggaacaggcccacagaacctcatcttctgatcggggcgtggaggcgttagtgccacttgccagctgccgtagagcctgtcccagttctgcagctggcggcttcgtcctacagcctcatcccattattctgcttttgagaaagagcagcccaaggccctagctggcttgtggggcctctggcttctccacaccaccccgagttctgcttctcagagttgtggggtccagaggctttgcccagaggcggtgtccccatgggctgctctggtttgagacgccgggcccagcggggtctctcctctgctgcgctcccgggtgctggggagggtggcttttgctgcttcaacccttaggcgaccatagagcctcttttcaagtcccactgacccccttggagactctgtccctgcctggcttctctcctggctgctgggaagagcaggcgaactgcccgccctgaatggatgctgcgctccaccctgggccccccattgggcaggagatggagcttggcagtcgggctgagcgggctcatgctggaagggccggggctggggtcggggcctcccctgcctgcagtgtgggtgtcagcgccctgctgccctccaggtgctggagtgttcaccaacacggccggactgcagaagctggcggacattatccaggtggggcctgctcctctgtggcatctccttccctgatggaagccgggcgggtgccttctcctgctgtattagttaactgattctagacttggggatgggagaaaggcccctacaccacctgtttctgattggcaaactctcggctcctttccagtgccctaaacccacactgggcctcctgcagggatgggggaggacgaggtctggtggcacatgcccagggtgatgctggtgagggaggacgcaaaggacagtgggggccggggagccgctcctgccctgtccgggccctcaggccaggggggacccactgctggcagccccagcagccccagctgcacgcagatgaagagctctggacacacgcggcttcctgaacagcttctccagggacagacaaatggggaccctgcaggttcccggcaggggtgtccctgggagcccatgattgggggtgcgaccctggcccccttctcattggccccgtcctgtcctgcaatgcccgtcccatgtgaggtctgcttctggctccatgcctatggcagcacctgctttccctggcgtagaggtgcttgtccggtttgtggagggcacgccccattttgggtgctctgggcacgttgcctctccggggcctcggtggcttttttagaagcagactcagaagtccctgactggggaagccaaggcacaggtggctgtgtggagccctgtgaggcctcctctgtgctgcccacgctgtacctgctggccacacgagatcatggcagggttaggcagggctgcccagcgctatgacagcttcatgagtgtccatctggcctgtggggtgcttgagctgggggaggccgcagaagaaccctgggatgcatggctggcctgtgcatgctgctgggcatggagctgcagatcccggaacaagcaggcactgccttctccttcacagacgcagctctgagcgggggcgagacctgggcagggaccaggtggggtgggcacagggtggtggggcccaggctcagccctccctccactgtggccgtctctgtggccagtgacgccacagcctgtgtcttctctgtgcggtagctggggctggaaggacagcactgccttgtcctcccaactcctccccaaaggcacggtgggcatcccaggcccagacccctctgtctgtggctcctgcctgccaagggctgctgtgctgtcccgcatggagtgtggttggctcttcaagcaggaggccgtgcacctatcaggcggacctgcttccatgtccctgatgggtcactgcaaagcacctccagcacatggccaggcgaggtagccctgcagcccagggcctggagggcaggtgtgagctggcccgggcctgtccctccctggaatacagcttcccaggctcccacttatggagaagtctcctccacactatggaactgaatcctagaatgtggcttctgaggttcctacactcgaactgaatcctggaatgcggcttccaaggcttccagctatggagaagactccacactctggaaccgaatcctggaacgcggcctcccaggcccccagctatggagaagactccacactctggaaccgaatcctggaacgcggcctcccaggcccccagctatggagaagactccacactctggaaccggatcctggaacgcggcctcccagcctcccacttaaggagaagtctccacactctggaaccggatcctggaacgtggcctcccaggcccccacttaaggagaagactccacactctggaaccgaatcctgcacactccatcggtttggaatttcctttggctgctgctctaagtagccgctggtggatgactcagcttctgccagccctcgggtgcctggaggatgagggactgcacacagtgctcacccgcgttggctcctgagcccctgcaggtgtgggcggtgcccatagggctggtgctgggttgggcctgcagccctgagtcacaggtgaccctgggggcagagtggggccagtggccccaggaagaggatgtgggatgcacagctcagctggaggcgaactccaggcagggtcaggccgtgtgctcggaagtcagggcttagctggaggcaaactctgggcagtgctggcccgtgttggggaaccagttgcccctgggcccccgtgagactgctgggtcctcatccctctctgcctgaggccggagctgccctgggctgaggcacagggggatttgtggtggtgtttttttgagaaagggtctcgctttgtcaccccggctggagtgcaggggcttgatcacagctcactgcagcctcaacctcctgggcccaagtgatcctcttgcctcagccacccgaggagctgtgaacacaggtgtgcaccaccgcactcagctaatttttaaaatttttttgtagagatgaggtcttgccatgtttcccaggctggtctcaaactcctgggctcaggcagtctgcccgccttggcctcccaaagtgctgggattacaggcaagagcttccatgcctgcccagcagaaggcttttcgaaggaagctgtttcctgaggcagactcagccctgctcatggcagccaccagcgtgggggtgaacttgttctgttacttccatccccgtgggccaaatgctttggtaaaacacaaggccctgtgtttagctgtcttgacagtgaaaatggctgggaaggaaggaaggaacggaaggaaatttctctctccttctgtgcgtacccaggcacgtgcacatgcatgcagagtacgcacacacgcacgcacgcctgcacaaatccacgcatgttgccaagtctctgtgttccagccgtggtgtctgccccccggtgttctctagttcggcttctccgcatttctgtgaatgattccggcttcttggtgttcccagcagaactccctcaagtctgcggcggggctctgacggcggtggcttggctgacatggccacattgctgagcctgttgggggctttgcgttcctgttctggccgtttttggctcgttttccaggaacggtcgtcacgcgctcctctcctagtgcaggcatcattcctttcccattgatttgcagggttctctgtaagttctgaggatcccatatacatatactctctgtaagttctgaggatcccatatacatattctctctctaagttctgaggatcccatatacatattctctctctaagttctgaggatcccatgccgacatacatattctttccttgtctcatgctggtcattttttccattttcatgacaggtttggtgaacacatgtttccttgtcagatttttgttctgagcttgtgcctcccgaccaagatgctaaaccgggtcttgtgtattctccaaactgcactgtagagtgacggagctttgtgtctgggcctccatgccttctgacgtcacctgtgggggtgtgaaaggcagactctaccttgatttttcccagcacgccacaccggtggttctgtgcgctgaccgagcggctcggcttcccccaactccactgggcacctgccacacttttcctcatgtttttgttcactgtggttttgtcgtaagtcctggtgttggcctgaaccaatttctttttgtttgtttttgagacagagttttgctcttgttgcccaggctggagtgcagtggcgcgatctcggctcactgcaagctccgcctcccgggttcacgccattctcctgcctcagcctcccaaatacctgggattataggcacctgccaccacgcctggctaattttttgtatttttagtagagacgaggtttcaccgtgttagccaggatggtctcgatctcctgacctcgtgatccgcctcccaaagtgctgggattacaggcatgagccaccgtgcccagcctgatatttttagtagaaatggggttttgccatgttggccaggctggtctcgaactcctgacctcaggtgatcctctcaccttggcctcccagagtgctgggattacgggtgtgagccaccacgcccggcctcttgttcttttgaaacctgccctgacgttttttccatagtgcatcttggagtcagcgtgtctacttcctgtaaaaatcttactgtgattttgactagaatgtgttgaattcctgttttttttttgagtcagggtctctctgttgcccaggctggagtgcagtgggaccatcacagctcactgcagcctcaacctcctgggctcaggggatcctctcagctcaacctcccaagtagctgggaccacaggcacatgccaccatgcccggctaggtttttttttttttttttttggtgaacaccctggggttgcaccatgttgcccaggctggtctcgaactcctgggttcgggcagtttgctcctctcagcctcccggagtgctgggattacaggcctgagccactgcactaggccatgttgaatttctagattaatttggggccctcaggggcacagagaggagggctgggccagttggcgggaggagaggcccctcgggctgccgcattttcagtgcatggagatggcctatgttgggggaacacagagctcaccgggggtccctgcagggaggagaaagggtcaggcaggtgccagctcctgtccattggcctggggctgcatgatggcaggggccggtgaaccgatgacccctgggtgtcctgtgaccttctgtgtatgcggctgatgctgcagaaagtcgggtggcctcaggctcctgacggggctgcacttcctctgcctttcagattgtgttcagtgtggacccctccgagggcagccctggttccccagcagggctgggggccttacagtcctataaggtaggggccacctccaggaggcaggtggagggcagcccttgttccccggcagggctgggggccttacagtcctataaggtgggggccacctccaggaggcaggtggggctgggggtcttctggtcctaaaaggtaaggggctgcccccaggacatgggcggggcctccacactcctggtcctgtcccctccaggtgcacatccatcctgatgctggtcaccggaggacggctcagcggtctgatgcctggagcaccactgcagccagaaagcgaggtacagacctgggcccacacgctccccgcccgcccgggtgcagtgcccggcaccaccatgccacaggctaggcacatgcccagccgtggatctcctgcccccatgggcctggccaccttctccatatccaggccaatccagagcattctcctcactgtccctctgaagattggagttactgagagacgtaggagatggcctgatggcaccgtgacctgcccagagtcacctggttggtggtggcagagccacagcccagccaggcctccctgctgggacacgctcgtttatgccgaggccgtcagcacagagcctccacagtgaggcacggctctgcctgctgcctccacgcagcgcctggccgggccaagcctcagggtcacatctgaagggggcccggctggccctgttgtccgaagcccctggtgcgctcagccccgaggccccacgtgccttcttggcttcctgtgctccgtggcgtcttcgagtcggtgctgccggggacgctgtgtggatggggtctgtgagtgtgccctcggctccgtgtccggagccctgtggttcttggggtgtatctggccccacccccactgcgtggtgtccagggtggggcttcacggctgcagctgcgggagctgctgcccctgccttgtgctccagtggggccttgcctctgggcttggttcgtccctctctggaacattctttctcagctgctgtccgacccatggtggcatgacgtggccctggctgaagcagcccttgtgcggttgctgtggttgggtctgcctggccgagccggaagggaagggctgggagggcgtcagggtggcgtggcttgacccccgctcggtgatggtcctgcagcaaggcctctcccagcaggaagcgtccatcccggggggaggccggcgcccctcacgcagttggggttgcgggaggcagtgcgtgcctgaggcagccggtgcacagattccaagggcctggaatctgtttgttccattgacctctgatgtcacttgacttctcagaagcagccactccctgcactgggcgtttgtaggaaatgagctcctggaggagggggtggggaagttcccccattgcagggcacactcagccccaggaaggaaacgtgcctcgtccctgctgactccgaatcgcagtcagagtcgttctgcttgtgccgtgttgaattcccggcatccggcatccagactcagcctcctccccaggccacggccgccgtggccagtcggtcaagcccttctaggaacttcctttgagctggcgcccttgttcactgctgacgccactcagaggcttgtgcacgtgtcctgcttccaggcagagctgggaactcgcaccccgtcttctgcacgcggccgtggaatgtcgggatgccggcgcttccttcccgtgtgctcttggcggggtgggcttcttgccctgagccgcatgtcacagtttctgcagaagtttagggttggagtgggctgacctctctgcaggtgtccccagcctctgcctggggtctgcctcctactcccaggaccccctgtcccccagaggggccccaagctggcaggctcacactcagggcagcctcctttgttctgacttctgcacagtgggcctgggtggctgcccgcggctcgcttgcttgatgccagtgggtggagagggtgatgggcagagaggcaggtggtcaggcccccagtcccgtcctcacactctgtgccctctgccgccccccgccccacagggaaggtgctgagctactggtgcttcagtcccggccacagcatgcacgagctggtccgccagggcgtccgctccctcatccttaccagcggcacgctggccccggtgtcctcctttgctctggagatgcagatgtacgggccacccctgccagggcctgagcaccggtgacacctctgacatcagcggggtggaagtggtgggggtccccatgagccgggtgctgggggtctcgggcctcgagggctaaaggggtgctggtgcacttccccactgtctgctccctctggccacgctcagccctttcccagtctgcctggagaacccacacatcatcgacaagcaccagatctgggtgggggtcgtccccagaggccccgatggagcccagttgagctccgcgtttgacagacggtgagggcctgtccctgggccctgctggggtgggaggtgggggagcactgaggcctgaggtcctgagcagtggcctctccggctctaggttttccgaggagtgcttatcctccctggggaaggctctgggtgagtgccctgaatgccccagctgtgcccatcctggatcctggacccctgctcccaagagctggtagggaaccctgcagacatcctgcccctgccttgaccccggcccctgcacttccaggcaacatcgcccgcgtggtgccctatgggctcctgatcttcttcccttcctatcctgtcatggagaagagcctggagttctggcgggtgcgtctcccctgtgttctgggcggggtgggtgagggcagggctggagcatgaagcaggcagtggtcacagctcctgcttgccctcatcggatcggcggcgtgaccagggctgccgtgtccctgcctcttcctcccacaggcccgcgacttggccaggaagatggaggcgctgaagccgctgtttgtggagcccaggagcaaaggcagcttctccgaggtcggcacttggccggggctctgggcctgctgccccctcgtgcctcccctgcctctcacagcttccccaaggctgaccactggccctgaccatgggctccggcggctcccgctgcctcttcagggctcctgcgtttccttcctggccctgagtgttgcctcttatcttacaaagcccccagcaccgggtgggtgtggtaacagtggccctcctgtctgagtagccctagtcggccaccctggccctggggttccccgtgttttctgggaagcactgagcaggcgtggggtcagcctgggatccgtgccaggaagaagcttccagaacccgattggccttcctggctaggacgatccttcatcttggagcatgagacctgggtctccctcatgggggaggaaggggctgggggggggctccaggctcagcctcaccaactttccttccagaccatcagtgcttactatgcaagggttgccgcccctgggtccaccggcgccaccttcctggcggtctgccggggcaaggtgagctctccagggccctctgccctgacctggttgcctgttccctggtgggtgcttatggctccccagcagactctgggccctgggggctgcccggtcccctccttgggtcccacgagagcgactgctggccctgctgggagcgtgtcctgctctgggcctgggcaggcaggatgggagtttcctggccacaagagttggaggtggcgtctgggagctgtggaccccaagtggggtcctgacccacagatggagcttcctcccacccctggttggggacggagcctcggggaaggtggctgggctgggtgtgggcaccagggagaggagcccccacggccccaggcagctccctggtgtgtcccctaggccagcgaggggctggacttctcagacacgaatggccgtggtgtgattgtcacgggcctcccgtaccccccacgcatggacccccgggttgtcctcaagatgcagttcctggatgagatgaagggccagggtggggctgggggccaggtgagttacagcagggtggggctggggtaaggcggtctggtgactgagcccccgccccgtggccaagggagcccccgtgaccgagccgcctcgccccacagttcctctctgggcaggagtggtaccggcagcaggcgtccagggctgtgaaccaggccatcgggcgagtgatccggcaccgccaggactacggagctgtcttcctctgtgaccacaggtgcgtgcagtccggtggcaggcgcggcgccaggggacacgcccacaccccactgggcccctggactctccttccccacatgaggccccgtctcctccagagcctctccggctactcggggtcagcgtggggcccctgcagcagatgagggtcttcacttcggtgaactgaacccttgaagcggctgtgggcagggcagcagggctatggccaccccccaggttcgcctttgccgacgcaagagcccaactgccctcctgggtgcgtccccacgtcagggtgtatgacaactttggccatgtcatccgagacgtggcccagttcttccgtgttgccgagcgaactgtgagttcctgcccagggaggggatgagggtgttgtccccagaggagccagaaatgggtccacccacccccatggttctgcagatgccagcgccggccccccgggctacagcacccagtgtgcgtggagaagatgctgtcagcgaggccaagtcgcctggccccttcttctccaccaggaaagctaagagtctggacctgcatgtccccagcctgaagcagaggtcctcaggtgcggacgggcagcgctgggtgggcggtgtgggggtggcggagcgggcggcgtggggcgggcagcaccaggcgcccagggcggaggcgactcacctggctttgtgcgcttcccctcccacctccaaaggctgcctctccctcctagggcagggcccccacgggctgcaaccctcccctacaggcagagaacgccccaggcaaggatgccccccgaggctgagactccccccaatagcagggaggacacccacaggcaggaccccaagtgctgggactctcccccaagaggggctttgccacaggcagggaccccagctggggccccccgtgggcttcactgcgcactcgggtgcccctgcagggtcaccagctgccggggaccccgagagtagcctgtgtgtggagtatgagcaggagccagttcctgcccggcagaggcccagggggctgctggccgccctggagcacagcgaacagcgggcggggagccctggcgaggagcaggtacagttccagggccttgggatggacacagaccctctgtctcctgaggccaacccgaccccgcccatctggcctcaggcacctccccacacacccctgtaaatcccctgcctggcaggcaggcgggcaagcgggcgggggatcccagctgcctggctgtctgtgggtcctccaccccacctcacccacaggctgctggctcccaggtggtgcatgccctggccctccgcgggtgccccccacatcactttggttctctggcgggtcagcttggctcagtgcactcaaggtcgggtgcccctgccactggctgcgcttgaggctggcctttctccaggaatgtgctgcgggtggaacccaggttccttcttccttggggccttttgccccagaagcccataattcctcaggccaacccgaaattttctccctgcttcctgctgggagccattcccctcttcctgcccatccctgcccttcaggcccctggagtgagctccaggtgcaggcaccaggcacctgtgtccccttcctgccagcccctcgctgtggtcggactgtcttccctggacctgctcttacaagtcaccacctgcgagcctcatgagccgctggtgtgacttggacaggaccaagttgtggcactgtcaccggggtgtgctgtgcccccctcccccgacctccatcttggctcagggctccttgggaccatcttccctgtgcgtccaggtgctttgggaccccagagtgtgtggttggggtctgtgtgtggttgtgagctgtgtcctcctcaggcccacagctgctccaccctgtccctcctgtctgagaagaggccggcagaagaaccgcgaggagggaggaagaagatccggctggtcagccacccggtgcgtgagctgtccctgcacctgtgccgaccaccatagacacgcatgggaacgcagccgtgggtgcccccagccacggctggtcccgatgggaccagggaatccacccccaggagctgatgtccagggcagctgtgatgctgacggccaggggctcaagtgtgtggtttcttctgcagggggctcatgagtcccagctggaatcaggccccacccttgggcaggtttggcatggggcctgcagcactgggcttggccctggcatttccctcaagtgtggatgcacacctgcctcatgtgagggacacagcccattcctagccttggatcaaagaacggagttatagccggagccaggaagccccctgcctgctggaaaaccccaagtgtggcggcctttgtccatgtcccttggcttctgggaagaactgggtggtgcccaggcagggctggtgccatcaggaagtgggtggctgctgaggggcctgggctggcgagggcctgggtggggagtgcctgggccgcccctgccttggtttccacgtttccgtgttggtctggggtgtgtagagagatgggcactgctcatccggaagcccctccttgtgcgctgccatcctgggagcctcagccgcatccgctgtggggcagggggcttgagggaggaggagagagacgggccatgcaggacccctggcttgaggcagagccaatctaccctttgcccattcactgctctcagttccctgccagcctctcactgtgtgacctcagacgggcccagccccacagctttcttcccgcagcccctccctatgtccatccagccagccagtttctcaggcagcagccccacctcggcagtcactgtcccagggaacgctcaatgttccaaggaaggctctgcagccccagggaccagatgatgaggctggccctgatggagcctcgggcctgtgtcctgcaggaggagcccgtggctggtgcacagacggacagggccaagctcttcatggtggccgtgaagcaggagttgagccaagccaactttgccaccttcacccaggccctgcaggactacaagggttccgatgacttcgccgccctggccgcctgtctcggccccctctttgctgaggaccccaagaagcacaacctgctccaaggtgccctggcttgcagaggccacccaccctgagggcagtgctgccgccgcgtgtggggtgggggccatctgggtccaaggtggtctctgttctctagagaaaaaggggcagatggggacagacgccccttcctctacaggcttctaccagtttgtgcggccccaccataagcagcagtttgaggaggtctgtatccagctgacaggacgaggctgtggctatcggcctgagcacagcattccccgaaggcagcgggcacagccggtcctggaccccactggtaaatggggccccaggtgggaccctcagactcctgcgtggaaggcagtgtgggccagagtcctgggctgcttggggtgggcatcctcgggccctgcttggccccgcctctctgttcccctatgggagtgatgggggcctccacctccaccaccagcaccagcagcaccacctccacctccacctccacctccacctccaccaccacctccacctccaccaccacctcctccaccaccaccacctccaccaccaccaccaccaccaccacctccacctccaccacctccacctccaccaccaccacctccacctccaccaccaccacctccacctccaccaccacctccaccaccaccacctccacctccaccaccacctccaccaccaccaccaccaccaccaccaccaccaccaccacctccaccaccaccacctgcaccaccacctccacctccaccaccaccaccacctccacctccaccagcagcagcatcacttgttggggagaccctgtgcaactccatgcacagccctgtccctgccatagccccgacccctaagcacagccctgtccaactgccacacgtcccctgcctcccatgcatggtcctggggggtcaactgcacacgccagggtcctagggtcctagacccctgtcctccctgtttctgcctctgtttggggtggagtccaagtctccagaggcggaagcatctgtgttcgtgtgttaatgaacagcccctacagagttcccctagttcacccaggggggaacctagcctgttgggacgaccccagatcccttctgggcttggtactcactgggatatcctcatgcctgcacccagcctacggctctgagctcctgagtggggctttggcctgcccgccactgttccagcccccatccagcaggctggtgtctcctctgatgcccccagcacccaggcgtgtacctgcctgggttttcccgccctggtctgaggtgggtgaggcctggcctccctagccagccctgcccccccaccccagggaactttccagatgctctcgaccagctttgtggctctacatctcttcatcaggaagaacggcgccggatcccaagctgaccgtgtccacggctgcagcccagcagctggacccccaagagcacctgaaccagggcaggccccacctgtcgcccaggccacccccaacaggtagctgactcctgaaccgtgtgcagcctacgacttggtgggtccctcagtggcttcacgaggctaactcttgagtgtggccggggctgcccctgtggggagccatctcatggtggggactgctcccggttctgcaccccgcagttgtcctgagcagctctccaggagttcctggaggaagggcgggcagggcggtgggactctcagtcctccaccccagcgccactctgagccatgctactcccacaccaggagaccctggcagccaaccacagtgggggtctggagtgcccagagcagggaagcagggccagcacgccgtgagcgcctacctggctgatgcccgcagggccctggggtccgcgggctgtagccaactcttggcagcgctgacagcctataagcaagacgacgacctcgacaaggtgctggctgtgttggccgccctgaccactgcaaagccagaggacttccccctgctgcacagcaagtggccctggcgtggggaacagccggtggggtggggggcaggggacaaaatgggggctgtgccgggtctgattgaagctccccgcagggttcagcatgtttgtgcgtccacaccacaagcagcgcttctcacagacgtgcacagacctgaccggccggccctacccgggcatggagccaccgggaccccaggaggagaggcttgccgtgcctcctgtgcttacccacagggctccccaaccaggtagggcacctgcctggctgctcctggcagcgccccaaccgcacgcagccctgggagtgagcagcaaagccccaggcccccctcagactcaagtctctgtctccaggcccctcacggtccgagaagaccgggaagacccagagcaagatctcgtccttccttagacagaggccagcagggactgtgggggcgggcggtgaggatgcaggtcccagccagtcctcaggacctccccacgggcctgcagcatctgagtggggtgagcctcatgggagagacatcgctgggcagcaggccacgggagctccgggcgggcccctctcagcaggctgtgtgtgccagggctgtggggcagaggacgtggtgcccttccagtgccctgcctgtgacttccagcgctgccaagcctgctggcaacggcaccttcaggttggtgcctggccactacagttcctgctgggtgtagccccaggtgatgggctgagggggaaagggcaggcccttgtcctggtggcaacgcctggcagacgtgtgcagtgggccggttgtctcacaggcctctaggatgtgcccagcctgccacaccgcctccaggaagcagagcgtcatgcaggtcttctggccagagccccagtgagtgcccacggaggcccccagcacacccaacgtggcttgatcacctgcctgtccagctctggtgggccaagaacccacccaacagaataggccagcccatgccagccggcttggcccgctgcaggcctcaggcaggcggggcccatggttggtccctgcggtgggaccggatctgggcctgcctctgagaagccctgagctaccttggggtctggggtgggtttctgggaaagtgcttccccagaacttccctggctcctggcctgtgagtggtgccacaggggcaccccagctgagcccctcaccgggaaggaggagacccccgtgggcacgtgtccacttttaatcaggggacagggctctctaataaagctgctggcagtgcccaggacggtgtcttcgtggcctgggcttggtggtgggagttgagggacagggagttggcagaggcccctcccagcctgccatgtgacactgtacttcctccacggtgggctcagccctgccctcatcctcacagccgcagccaagctgcagttggtaggggatccaccgacacaccaggctgcctgggctggtctctgggttgggagctgccccaggtgctgaggagggcagctccctggctggtgaggcccctcccagaaccacccttggactgagctctggggagggatggtaccaggtgggtgaggggggctgcctggggagggaggggttcctatggggcgtggcgaggctggcccagccctctccccgcccatatatgtagggcagcagcaggatgggcttctggacttgggcggcccctccgcaggcggaccgggggcaaaggaggtggcatgtcggtcaggcacagcagggtcctgtgtccgcgctgagccgcgctctccctgctccagcaaggaccatgagggcgctggaggggccaggcctgtcgctgctgtgcctggtgttggcgctgcctgccctgctgccggtgccggctgtacgcggagtggcagaaacacccacctacccctggcgggacgcagagacaggggagcggctggtgtgcgcccagtgccccccaggcacctttgtgcagcggccgtgccgccgagacagccccacgacgtgtggcccgtgtccaccgcgccactacacgcagttctggaactacctagagcgctgccgctactgcaacgtcctctgcggggagcgtgaggaggaggcacgggcttgccacgccacccacaaccgtgcctgccgctgccgcaccggcttcttcgcgcacgctggtttctgcttggagcacgcatcgtgtccacctggtgccggcgtgattgccccgggtgagagctgggcgaggggaggggcccccaggagtggtggccggaggtgtggcaggggtcaggttgctggtcccagccttgcaccctgagctaggacaccagttcccctgaccctgttcttccctcctggctgcaggcacccccagccagaacacgcagtgccagccgtgccccccaggcaccttctcagccagcagctccagctcagagcagtgccagccccaccgcaactgcacggccctgggcctggccctcaatgtgccaggctcttcctcccatgacaccctgtgcaccagctgcactggcttccccctcagcaccagggtaccaggtgagccagaggcctgagggggcagcacactgcaggccaggcccacttgtgccctcactcctgcccctgcacgtgcatctagcctgaggcatgccagctggctctgggaaggggccacagtggatttgaggggtcaggggtccctccactagatccccaccaagtctgccctctcaggggtggctgagaatttggatctgagccagggcacagcctcccctggggagctctgggaaagtgggcagcaatctcctaactgcccgaggggaaggtggctggctcctctgacacggggaaaccgaggcctgatggtaactctcctaactgcctgagaggaaggtggctgcctcctctgacatggggaaaccgaggcccaatgttaaccactgttgagaagtcacagggggaagtgacccccttaacatcaagtcaggtccggtccatctgcaggtcccaactcgccccttccgatggcccaggagccccaagcccttgcctgggcccccttgcctcttgcagccaaggtccgagtggccgctcctgccccctaggcctttgctccagctctctgaccgaaggctcctgccccttctccagtccccatcgttgcactgccctctccagcacggctcactgcacagggatttctctctcctgcaaaccccccgagtggggcccagaaagcagggtacctggcagcccccgccagtgtgtgtgggtgaaatgatcggaccgctgcctccccaccccactgcaggagctgaggagtgtgagcgtgccgtcatcgactttgtggctttccaggacatctccatcaagaggctgcagcggctgctgcaggccctcgaggccccggagggctggggtccgacaccaagggcgggccgcgcggccttgcagctgaagctgcgtcggcggctcacggagctcctgggggcgcaggacggggcgctgctggtgcggctgctgcaggcgctgcgcgtggccaggatgcccgggctggagcggagcgtccgtgagcgcttcctccctgtgcactgatcctggccccctcttatttattctacatccttggcaccccacttgcactgaaagaggcttttttttaaatagaagaaatgaggtttcttaaagcttatttttataaagctttttcataaaactggttgtagttgcacagctactgggagggcagccggggacacctgagccgcccgctgtgcccagatccctcaggctgcctgccatcagaactgctgcccggggcttcccctacctcagacagaccctccctgggaggatcagtggggagtgccacctctgcccccagtggctgtggcacgtggcaggggcccctgaagctcagcgagggtcagggcctgggagggtatcattgctggaagaacaggatggggctcaggccagccctagtcgccggggcccacactaaccccccacttatgaattcctcccactcccaactcacaggggatttcccgagaggggacctgccaaagacctcctccaggcctcccatgctttccgggaagtgaagcttctccctctctggggcaggctctgaagcctcccgatgcacccagagcaaccggggggctgcaccagccactcgcctccccagcacggccaggttcccggggctggaggtcccccccaggtcctgggaaccaacctgcagaacacacacagggtcccctggagaggacgcggggacttccagggcccgactcctgtgagtcacagccccgcagctgctgcgccacccccaccctgactcatgccccttcccagcagctcctcccaggaccccatgtccttcccacatccgcaggaagggagtgcctggactctccaggcccacctggggagcccctcacctgcccaccagcccctgagcagcccagtaacaccatcaccgtgtccaacagccaggagcctccaccctccaggagggaagggatggacagagccacactcgccgtctttattttgcactcaccctgggtgacactgggcaggccgctcctgcccacagccagactgaggaagaacacagcactcggcaggcccagtggggtccgtgcagggaggaccccaggaccagccttactcccgagcaggggacacagggccccacagagaacccctccgggaggttctctcctggctgggggagggctctggacccccacaaacactccccaacttgcggggctggggcataaaaacagccactcccagcaggccccctcagctttttgcatcagtcagctccctcccgggggattagggtgaggtgaagccaggcccaggcgtggggtataggtcttcccccgcaggcctcagccctgtcccgaggctgcatcacaatccagggcccccgctggcctttgggaacatggcctgggtcttcctcaaggcaagatcagccccagaccacttccggggtcacggggtcacggggtcacagggcagaagccagatggcagccatggctgacgggcctcctcctcgatggggcggagacagccacggggtctcccgagggtcccacagggctgtcctcatgcagcccaagccagcctgagcactggagccccaattcccaaccaggtctccctcagaccccccagaaagggcctcgaaaggccgccgctgcgccctgtggaaaggctgccgctgcagggcctgggccagccgggctgccagactcccctccaaagcctccggatgcctacgcttttccagacatagaggaaagtttgtcttcgagaaaacaaagtaaatagaagaaccccaaagcaaagcaaacccaccccccagatcagcagcatgggagccaacaggaggccactcctccagcaccaggggaccagccgtcccgacggcagcgcggctgcgcctacgtgatgtccctctgccgcggcggccggtgcacattccgcacgacacacttcaccatccactcgatgccctcgcgcacccctttgctgtgaagacagcgggtgtgaggcggggggtctcggtccccaaagcccccgcaggtgcagcccccactcaccctgtgagggccgagcaggcctgggtcaggcaatctcgcctgccgatcttgctggtgcagtcgctgaaggccgtcttgatgtcagggattgagaggcacgtctgggggaggtaaggccgtgaggagcagcccccacgtctggccctgtcctgcctgtgggcccgggactctcagaagggcgtatgcccttcaccccagggaaacagccagagctccaccagggtcccagtgtctcccacagagaccacagcagtgaggaccctgtgctcagcccgaggctgaacatggctggtagtgcctgagacaaactagacgtccacacggctccaaggagtccaccccccatcccctccctgggggacaccctgagccccgaggtggggcgctgaggactgaggcctcctgggcagtggcggaggcaggtcccaggggcccacacagccggggatgatggagaggtgggagccctgcatcagtgatggaggcagtctgcagtcatggtggcttctgctcacaaccacctgcccagtcttcaaaaagcagccctcccctccccttttcctccgaggggagacccctgccccgtaccagatgtccctcttgtcggctgagattgtaggggaggccagccttacaggctgggggcaacagagccaccccagagaaggcaggaagtgaagattcacctggccctctggacgccgggctgcttctgtgcaaagccactccaagagaacagctagaactcagcgtggccagtgctcccgggggcagtggcacctcagaggggtcttgaggggctgccctgggggtggggctggcacagatgccacctccaagggtagcaggaacaggtaagggtcagagctgactcccaccagggccccagcatcacttctttgagctctgagtttcacctgggtgtccccacagcttggccacacactcctgagacacggccgccctcctggggagaggtgccctgcatagcaggaagaggcctctgggcgcctgccctgaggtgggagaacctccagggctggcagcagcaggtctggagaggaaccaggcttgggaagctgctgggggcagggcaggccttgagaatggctctgtaccccctgggcagtcactgggcctggggtgtctgggtgcacacctgctccccttgctgtgggggaggctggggactcgggaagctgctgcgggaggcaggggtggggctcacctccacatcctgcttgttggccagcaccaagacggggacaccgcacagcgcctcgctggtcaccaccttctctggggagggcaggagaggcagcgcctcacacccagcatcctgcctctgactgcccaggggcccacaggcgtggacactgtgacagccactccctctgccccccccccccccgtcacccactaggcaggagcacttctgaccagacactgagcctgccccaggcacagagctgcccaagctggacctgcccccactcaccatccatccctcccagagcagccaggccgcactcaccaaacgcctgcttggactcagccagcctctcctcgtcggtggagtcaatgacgtagatgacgccgtgacactccgcataatactgggaggaagcaccaggagttggggctcagtccccaccctgccaagggccagcagagccaggcctgtgtcatggccacagtgaggggctcacatgaggaaggggcaagagggcagcccccaactgcaagacccttctgggatgcattctggggttgcggggagatctggtggaggtgtccccagacgctgctcctgagaacctgccggcaacctttggcctgatggtggccaaaggtgaaagacagggattgggccaggcgtggtggctcacacttattatcccaacactttgggaggcagaagcaggaggatcacctgagcccacttcacggccaacctgggcaacacagtgagactccgtctgtacaaaagcttatggtaatgtgcgcctgcagtcctagctactcgggaggctgaggtgggaggatggcttgagcctgggaggttgaggctgtagtgagctctgatcacaccactgcactccagcctgggtgagaatgagagaccctgtctcaaaaaaaagatagggtttgggggctggaggaacctagaccacagcctggcccgttgagggagtgcacctgtggggctctgtgccagcacctcgcacagggagggagtgtggccatgcggataagactgaccagcgccatctacgaagcgagccttccctgccaggacagggccagagtcactgagctcagacctctgcagcctgggctggtcagtcctgggctcgctggcaacactcctgggcaagacagggcacagcccctgcagcctcaggtacaagtgctgagccctggaccagatgagtgcacctctatctcaatcagaaaaaaacacagcaaactccgcgtccacgtggagcagacaacagctcacatttgccactttgcctccaggctgtgccagctctcctgtccaggcatgagtgcccagagacctagaactggatgctgaccaggtaggacaagctggtggtcagtgtgttaagacacacacacccgagagcatgagaagccaggaggcacagcccaactctccgaaatccttagggtgtctgagcagggagtaccagacaaccccatcccagtgccagacaagcttgtgcacctgcacttcccacagaggagagaagcctgtgcacctgcacttcccacagtggaaaggaggaggcccaaggccaggcccccccacccccaggaacttcccacagtggagaggaggcccaaggccaggcgccctccagggttctgcaggtagcgaggcccccccacccccaggaacttctctggcctacagacaggtcccacacagaggccgccaacccctcaagggaccctgcagtgtgccggctgtctgctgctgacacaagggagcaggcggaccctaaggtggagacctctgtggcaggaggggcggctctgtggaggctgcagcaagcccagtgagagaatctccacgtggctcctggggcttctgagcagggtggcagaaggttcatgtgcaaccgggtcctggaccatgggaccacgtggccagagccacccatcacacctaccaggcacaaggtgcacagcccagcagggccgcagtggacgggagcgacacctcagggctgagtgcgggcaggacccagagccccacgccccagtggaggcgtcacagcagtggtcattgtggggtgccccacaaggagggggaagagggaggtgtccaagcgtggctcctggctggccagctgaccccagtggagcagtcagagggactgtgggtctgagtttttctccccagcagcaatgggagctccccaactgcaaagtgccagccagcctgagagactagtgttacagcaaagaacccaggagctgaggtcctggcacatgccacacatgtggacaccaacccagggtccagccccaggacgaggccaattcgcaatgacgcccctttctgtggtgctggctctgcacaaggatgcaggatacaggaaaccagggtgggagcaggggcctcccttccggtccctcccagtgacctaggggggtccctgcagctgatcctcccagctctgagctcagcagggtcaggggtcccggccactagagcagcacatactcagcagacacgctgaatgacgagccacagctgcctcatgggcatgacttgcacctcatgtctaggagaccctggtgggcaggagatggggctgccatcccacagctgtcccacagctggggacccagggagccactggccccaccacggtggtgtctggagaagggctcagactgccaggaagtcgcaccccagcagaagtggtagtgaattgggagggcactcaaggaagggctgtgcagccccaagaccagcagcaaggatgggctacagtggcccccttaagtctccctcttccagtttcgccttaagagaggccctcaggaccttggaggaacccctctccaacgtggaagtgtgggtccacatagggctgcagctgtggccagtgcaggcatctctggccccactgtattcttgcttcatgttggagaacactgcaccagcagatggtctcattttggtttctgtgggacccactttggctgcaaagagccacactgccaggtcacacctgcccagggcagcccacactggggacccaccaggccatggtgtgaagtcccggccagcctggccccacatggcacagcatagccagttctcctccagggctccctgctgggccaaccacagctctgtggatcctgctgcctgagtcgacctctcctctcccgtcctccctgccttcctggtgccgacccccagtgtgcatcctgtacctcgacctgtctcagcatctgtgcctgagacaccggcctgtgacaagatcatcatcatctgtgtcactccccaagcatgctgcgcactggacacacaggccctgactcaacttgtcctgtctgacttcagtggtcctacaggatctatcagagatcacttggccatgggagaaatgtcttcttggctagaagtcacagcaggaggggacactttgggggcgcctaggaaaggggaactaggatcaaaaaagagatcaggacctgggcactcagctctagagatggcatcagggcagccaaggcactggggacaccccacacccactgtgccagcctagggcagggagcccgaggaagccacaggctctgccctgctcagtgctggactcagtgcctggcccaggctgagaaggagataaactgcagccttgggggtgtggggaaggggcaccacactgggatctcagaaatgcccaaaacctgtgtcaaaataggagactgccgctgtgagaccctgaggagtcttctggtgatcatggaagaacaaatgttaagctagaactgaaggaacctcatcaggggagaggcagccatcctgccgtccccacatctggtctttgccatttctgtgtcctgtggtggtcagcagcaaggtctctgagccgaaaggaggcactcactttggaggagtgcagggtccccaggtccccacactttgtcttgtcctgactgagaaagaaacagactgccctgacctctctgacttggccagcgaggttgcccttaggctcaaacccaagccagggtttgaacattcccagacacttgtaagatgtttaggttgttaacataatgttcaggtttcaaaacattgaaagaaactagccccagccctgaacccagatcccccccggcttcaggcatgaccagtgaacacgcccttctctcactggtcacctgaggatgccgcactctgtcaacaggttcccctaatacatgctctgatctgatcgccttggcatttagtgattctttccctggaattctccactggccccatcgcagggaactcccaagtgggaaactcccctaccaccacttttggggcaacttcagctaagggttcagctgggacaaaacagggagccactcgggaacctgggacaggaccagagagaaaacccgagggacagagtgggtaaggaaaactgctgaggaagggcccaaagggcactctggaaagaagtggcactggagggctggggtgggggtggtcctggccagggagtcttaccttgtcccacaaagactgcagctcttcctgccctcctaagtcccagaacatgagccgagcctttcccacatccacagtgccgactggggagaggaggaaacaggcaaggctcatgaccttggtcctcgacacacccagtcccagctctcccaggggatggggcaaaccatgctggtgccactcaaatgagacttgagaggggcccgacagggctgtggccacgggccagctggactgtgaatatcacggcatcctcaaggccccaaacccacagcctgctattgagacccttactgtttaggcccacggtggtggtgattttggatagactcatccccttgtagttcttgttaaatcgggttttcgactgctccaggaaggtctgaggagagaggcagaggcgaaacacatcaaggaggggctatactggcttccaaatatccttactcaggtctgttctttaaaagacagaaacagaaacagagcaacactctgctcttcaggaggctggtggtgactatcctgccgtctcaggtgaaatttggcttccgtctgggtagtgaacgtgcagctgacagcacaaaaccgaagggggcgccgccaggccgtgggaaaggtgcgcgcaagggcgtgggcactcaccgtcttcccagcattgtccaggcccaggatcaggatgcagtactcgtccttctgaaacatgtacttgtacaagcccgacagcagcgtgtacatcctgccctgggcaccccaacataggtcagtgtgcagccagaaagcacctcccctcccccgggcttctccacggtggtcagtggcgccccacgtccagccgaccgctcaggacgagagcctgggggccattcccgactcctcgtccctctcccaccccgtccctctgtaacttctcccaggtcagccgccactgtgtcctgctcacagcaatgactgcgacctctccgcatacacatcggttccggcccctcccctgctcgcgggactacccagccgggtgttcacagtgagctcagccgcgctcccgccctcccccgaggcttcgctcccacgcttcacgcgcgcggaacggggaacacactcgctgcagccccgcctgggccacggcaccctcgagcgccagccccgcgccccacccgggagcagcgagccaccggcgcgctccccaggagcccctgcaggcgccgggtagggacgccccatcaccccatttcttaaaacggggacggccctggggggagcggactacagggcgggtgagcagcggcgcggctgctcctggagtgcacctggaggcggcgcgcggctggcagggaacgactgcgaaggaagaacctgggtcgcggcccccggctacgtccgccccaagccgccgccgccaggtctgaggctccccgacaagcagccaaagctggctcctgtcacacccgcgtcccacctcgagtcctgggccgcccctcgggcctcgcgcctcaccgcacagcctgcggcctacctgcgtccgccgcgccctcggagccgctgctgctgacccccgctgacctccgctgaccccgcgctaaccccgcgcggcgcctgacgggacgcgggccggcctcagggaatgagctgaaccgcgtcccagcggcctccgcgctccgcttcccggctgcccccgcgcgccaagcacttccggaagcggcggcgctcgggaggaagtgccgatcggctgctggggcgaaaagggggcgccgggccgctctagccggtgaggccggcgggctctctgtggctgcggctgggaaaccgcgcggaggaggtgcccggccggggaccaggtggccgcggtttgcggggacgcggccctggccagacagaagagacgccgggcgggggggcgcggccggcctggaaggcggcgggcgcggcgggtgggctcggcggagggtgaggcggcggggcgccccgcggggaaggggctccggagtgacgcgggacccggctagcggcgagcccacggcggctcggaagggaagcgcggagcctgagcgggggtacccgggctgcgacctctgcgctgggagctgtgcctctgagccggtgtctccccgagggaaaggggacgtgcccgtgcccgtgcccgccctcaggctgtggggtcggtcccgagacgcggggctcagctggcttctcttcttgcagccctggtccagcgcctccctctctcagcatggacgaggagagcctggagtcggccttgcagacctaccgtgcgcagctgcagcaggtggagctggccttgggcgccggcctggattcgtctgagcaggctgacctgcgccagctgcagggggacctgaaggagctcatcgagctcaccgaggccagcctggtgtctgtcaggaagagcagcttgttggccgcgctggacgaagagcgcccgggccgccaggaagatgctgagtaccaggctttccgggaggccatcactgaggcggtggaggcaccagcagcggcccgtgggtccggatcagagaccgttcctaaagcagaggcggggccagaatctgcggcaggtgggcaggaggaggaagagggagaggacgaggaagagctgagtgggacaaaggtgagcgcgccctactacagctcctggggcactctggagtatcacaacgccatggtggtgggaacggaagaggcggaggatggctcggcgggtgtccgtgtgctttacctgtaccccactcacaagtctctgaagccgtgcccgttcttcctggagggaaagtgccgctttaaggagaactgcaggtaaagccctttgttgtcagatgccaaccttaggggcgtaaggggcacgcacacagggtcgggtcaggatcggccctccctttgctttgcagttttgtctcagcttcctggggcaggcgtgctttgacagctgtgtctgtgttcaggcgtctacgtcttccttctggggtgaatcaagaagcatggaaggaggccaggcgcggtggctcacgcctgtaatcccagcactttaggaagccgaggcgggcagatcacctgaggtcaggagttcaagaccacgctggtcaacatggtgaaaccccatctccttaaaaacacaaaaatgaaccggtcgtggtggcgcgcacctgtggtcctggctactcaggaggctgaggcaggagaattggttgaacccaggaggccgagtttgcagtgagtggagatgcagccactgtactgcagcccgagcagcagtgcaaggcttatgtggaagagagtaggtctccagcctatcgtcagtttttttttggtggttgttttaattttttttgagacagggtcttactttgtcaaccaggctggagtgcagtggcatagtcctggctcactgcagcctggacctcctgggctcaaccgatcctcctgcctcagcccccctaggagctgggctacagactcacgctactacacccagctaatttttatattactataattttttatcttttttttgagatggagtcttgttctgttgcccaggctggagtgcagtggcgtgatctcggctcactgcaagctccgcctcccgggttcacgccattctcctgcctcagcctcccgagtagctgggactacaggcgcccgccaccatgtctggctaattttctgtatttttagtagagacggggtttcaccatgttagccaggatggtctcaatctcctgacctcgtgatccgcccaccttggcctcccaaagtgctgggatgacaagcgtgagccaccgcgcctggccttttttttttggagacagagtttcactctcctcacccaggctggagtgtagtggcgcaatctcagcttaccgcaacctctgtctcccgggttgaagtaattctctacctcagcgtccagagtagctggcattacaggcgcccgccaccacactgggctaattttttgtatttttagtagagtcggagattcaccatcttggccaggctggtcttgaactcctgacctcgtgatccacccaccttggcctcccaaagtgctgggatcacaggcgtgagccactgcgcctggccctgttgttagttttattctctagagttcaacttttaaattttactttcatggagattttcaaacataccccaaattagagagtttagcataatcaccgcccacggtccatcatccaatgtcgtcatttattaatattttcccagtctcattttgtctgttctccctgccctatttttttctttcctgggccattttaaagcaaattccagaagttactggttttttccaattatgaatacttcatagttgcatctctaatctaactgattaggaaattacttaaaaagtaactttttggaagtccaagtccgatgtgaggacaaaaaagagtaacttctgtgtcataataggtaacacatttaatggtaatacctcttccatattcaaatatgaacaattattactgtaatgtctctatttccctaagcgcatagctttatttttcctcctttttacttttctcttagaagaaatatttaccaagccttctagtaggtaattttcttttttagccaatagttcaggctgaccgtgtaaccatccctagttctagttctagttctttgaatgtcttccttttttttttttttttgaaacagcgtcttgctgctctgtcacccaggctggagtgcagtggcacaatctcggctcactgcaatctccgcctccctggcccaagccatcctcccacctcagcctccctaatagctgatactacaagtgtgcactgccacgcccagctaatttttgtattttttgtagagacgggatttcaccatattacccaggtctcgaattcctgatccctttgatgagagatctgacacatccctgtggtgctccctctgggccaggcactgctccaagggtttcatatactttcattcatctgtgcaacagccctgtaggtaggccctgcagtcacaccatctgacagaggaggaaacaggagtagaagaactgagtggtccagggcttcaaggctcagagggctccggttgcccccagccctcgttccgtcccctgctccacccagtgctgcttgccatgtcggcatcaggcctgatctgaaagcttccggagcatcttacagacgtccaccttgccaccattcaggactgataagttctcttggatttgcgttggaccttttttttttttttaagatggagtttcactgttgttgcccaggctagagtacaatggcatgacctccacctcctgggttcaagggattctcctgcctcagcctcccaagtagctgggattacaggcgcctgtcaccacgtggtgcccagctaatttttatatttttagtagaggcagggtttcaccatgttggccaggctggtctcgaactcttgacctcaggtgatcccgccttggtttcccaaagtgctgggattacaggcatgagccaccacacccggcccaggatttctttatatattctggatatcatcccttatgaagtatatagtttgcagatatttgctcccattgtttgggttgtcttttcacttgatatagtgtcctttgatgcacaaacattttaaattttgatgcagtgcaatttattgtttctttattgcctatgtttttgtcatcaggtttaagaaaccacctcatccatagttatgaggattttcacctatgttttcttctaagagttctgtagttttagctgttaaatttaggtctttgatccattttgagttaatttttgtatatgttattaggtgagggtccactttattcttttgcatgtggatttccagttttcccagcaccatttgtttaaaagactgctttttctccactgaatggtcttggcacttttgtccaaaatcaattggcaatatatgtaagggtttatttctgagctctctctcctgttccattggtgtatatgtgccagtaccacactgttctgattattatagctttgtgataagttttaaactcaggaagtggtagttattcaccatttgctcctctttttcaagtttgttttgtttctggatcctttgcaatttcatatgaattttaggatcggcttgtccaattctgcataaaagacagtttgaattttgatatggattgcatagaatgtgtagatctgtttggggcacattgtcatctttacaatattaagccttctggctgggtgtggtggctgacgcctgtaatcccagtactttgggaggctgaggcgggcatatcacttgaggtcaggagttcaagaccagcctggccaacgtggtgaaaccccgtctctactaaaaataaaaaacaaattagtcggaggtggtgcacacctgtaatcccagctacacgagagggtgaggcaggagaatcgcttgaacctgggaggaggaggttgcagtgagctgagatcatgccactgcactccagcctgggtaacagagggagactccatcttaaacaacaacaataacagaagaaaaaaacagtattaagtcttccaattcatgaatgaaggatctgtccatttatttacgtctttaatttctttcaacagtattttgtactgttcaagtcttgcacattcttggttaaataagtattatttttgatgcttctctaaggaattgtttttcttttccttttttttttgagacagagtcttgctctgtcacccaggctggagtgcaatggcacaatcttggctcactgcaacctctgcctcccgggttcaagcaattcttctgctcagcctcccaagtagctgggatcacaggtgcctgccaccacacccagctaatttttttttttgagatggagtcttgctctgttgcccaggctggagtgaagtggcccaatcttggctcactgcaagctccacctcccgggttcacaccattcttctgcctcagcctcctgagtcgctgggaatacaggtgcctgccaccacgcccagctaattttttgtatttttagtagagatggggtttcaccatgtagccaggatggtctcgaactcttgacctcaggtgatctgcctgcctcggcctcccaaagtgctgggattacagatgtgagccactgtgcccggctggagttgttttccttagttacattttcaggctgtttgttgctagtatatagaaatacaagctgggcaccgtggctcacgcctgtaatcccagcactttgggaggccaaggcgggtggatcacctgtggtcaggagttcgagaccagcctggccaacatggtgaaatccagcctctattaaaaatacaaaaattagtctggcatggtggcaggtgcctgtaatcccatctactcaggaggctgaggcaagagaattgcttgaacctgggaggcggaggttgcagtgagctgagatcgcgccattgcactccagcttggggaacaagagtgagacttcatctcaaaaaaaaaaaaaaagaaatacagtggatttttttatgttaatcctgtattgattgctgaattggtttattagtgctaataggattttttatgcactatttaggattttcgatatatacaatcatatatattcaatatatacaattaatatatatgtgaatagagataattgtagtctttgtttctagtttgcatggcatttatttctttttcttgcttaactgccttagctagaacttcaagtacaatgttgaataaaagtgactagagcgggccgggggtggtggctcacacctgtgttcccagcactttgggaggtggaagtgggcagatcacttgagatcagcagtttgagaccagcctggccaacacggcgaaaccccatctctactaaaaatacaaaaattagctgggtgaggtgatgtgcacctgtagtcccagctacttgagagggtgagacatgagaattgcttgaacctggggggcggaggttgcagtgagccaagatcatgccactccactccagcctggacgacagagcaagaaccctgtctttaaaaaaaaaaaaaaaaaaagtggctagaacaaacatctttatcttgttcctgatcttaggtggaaaacttttttgttcctgatattaggtggaaaacttttagtctttcactgttgaatatgatgttacttgtaggttttctgtagattccctttatcgagttgaggaaattctcttatattcatagtgtgttgagtgttttttatcatgaaagggtgttgattttttttttaaagatagggtcttgttctgtcacccaggctggagggcagtggcatgatcatggctcactgcaacctcgaattcctgggctcaggggatcctcctacttcatcctcctgagtaggtgagactacaggcatgagccaccatgcccagctaattttttaatttttctgtagaggtagggtcctgctttgctgcccaggctggtcttaaactccagggctcaagcaatcctgcctcagcctcccaaagtgctgagattacaggggtgagtcactgcactgcacccagctgtgtgggatttttcaaatgcttttttcctttagatgatcatgtgtggtttttttcctttcattttgttaatgtggtatattgattttcgtatgttgaaccatccttgaattcctcagataaagcacgcatattcatggcgtattatctctttattattattatttttgtagagatgagatttcactctgttgcccaagctggtctcaaactcctgggctaaagtgatcctcctgcctcagcctccgaaagcgctgggattataggcatgagccacttggccctatcttttttctttttctttttttttttttttgagacagagtctcactctgtcgccgggctggagtgagtggcgcgatctcggctcactgcaacctccatctcccgggttcaagcaattctcctgcctcagcctcctgagtagctgggactacaggtgcccgccactatgcccagctaattttttgtgtttttagttgagacggtgttttgccatgttggacaggctggtcttgcactcctgacctcgtgattcacccaccttggcctcccgaagtgctgggattacaggcgtgagccaccgcagcgagccttatctttttaacagttaaaagtttaaggccttatcatgtaataacattgctggatttgatttgctgctgttttgttgagaatatttgcatctgtattgataagggatattggtctgtagttttcttttcttggcatgtctttgtatagctttgatgccagcataatattggcctcatagaatgagttaggaagtattctttatattatgggaagaggtaaaaagggattggtgttaattcttcttcaaatgtttgatagaattcaacagtgaagtgatatatacaatcatatatagagagagagagagagagagagagatggacttttcttttgttggaagtttattgactattgattcaatttccttattgaaattgacttttctttttggaagctaaaacgtataactgtagtgaaagtttctgaacttttctttcattggaagttttttgactactgattctttatttgttataggtctattcagattttctgtttcttcttgagtcagtttggtctcgctctgtcgcccaggctggagtgcagtggtgccatcttggctcactgcaacttctacctcccgagttcaagtgattctcccacctcagcctccccagtatctcggactacaggcgcacgccagcatacctggctaatttttgtatttttagtaggaacagcatttcaccatgttggccaggctggtctcgaactcctgacctcaggtgatccacccgcctcggcctcacaaagtgctgggactacagacataagccaccgcgtccagccttgagtcagtttagatagtttgcatgcatgtttctaggaatttgtccattttgtttatgttatctaatctgttaccatacaattgttcatagtatccttttatagccctagttatttctgtaagatcagtagtaatagctccactttctctcttggttttagcaatttgagtcatctcttttcttcctctttttttttttttgagatggagtctcactgtgtcacccaggctggagtgcagtggcatgatcttggctcactgcaacccctgcctcccaggttcaagcaattctgccttagcctcctgagtagctgggattacaggtgtgagccaccacacccagctagttttgttttgtttttttgtttttgagacggagtctgtttctgtctcccaggctggagtgcagtggtgcaatctcactcattgcaacctccgactcccagattccagcaattctcctgcctcagcctcctgagtagctggaactataggcgtgcaccaccacgcctggctgatttttatatttttagtagagatgggatttcaccatgttggccaggctggtcttggactccctacctgaggtgatccgcccaccttggcctcccaaagtgctgggattataggcatgagccaccatgcccagccagtttttgtatttttagtagagatggggtttctccctgtcggccaggctggtcttgaaatcctgacctcaggttatccaccagccttggcctcccaaagtgctaggattacaggcatgagccaccacgcatggcctgtcttttcttcttggtcattttcgctaaaggtttgtcaattttgttgatcttttttgttgctgatctctattgttttcccattctgtttcatttatttccattttaacctttgtttccttttttctgctggtttgggtttaatttgctctttttttcccctaatttttcaaggtatacagttaagttattgatttgagatctcttttttcttttctttttttttttttttttttttttttggttgctgttgagatggagtctccctctgtcacccagactggagtgcagtggcatgatctcagctcactgcagcctccgccgcccaggcgattctcctgcctcagcctcctgagtagacgtttcccggccaaggtgtttctttttgaatgtaagcatttacagctacagatttccctctaaacactgctttcactgcattccataagattgttttttgttgttgttttgttgtttgagacacagtctcactctgttgccgtttggagagcagcgatgcgatcatagctctgtagccttgagctcctggactcaatcagtcctcctgcctcagcctcccaagtagctgggactacaggtgtacaccactgcacctaactaatttcttttataagtttttgcagaggccaggcacagtggctcacacctgtaatcccagcactttgggaggccaaggtgggtggatcacctaaggtcaggagttcgagaccagcctggccgacagggagaaaccccatctctactaaaaatacaaaaattagctgggcgtggtggcaggtgcctgtaatcccagctactcaggaggctgaggcaggagaatcgcttgaacctgggaggcagaggttgcagtgagccaggatcacaccattgcactccagcctgggtaacaaaagcaaaactccatctcaagaaaagaaaaaaaaaagtttttgcagagacagggtatcactttgttgcccaggctggtctcaaactcctgacttgaaggagtcctactgcctcggcctcccaaagtgctgagattatgggcaagagccaccgcaccctgccacttggctgttttgttctgttgtatttccattttcattgatctcaagacatcctaatctcccttttgtttttttgttcgacttactcgttattcaagagtgtctttatttctgcatatttgtaaattttccaaaaaagtttttctttctttcttttttttttgagaaagggtcttgctctgtcgcccaggctggagaatggtggtgcacaatcttgcctcactgcaacctctgcctcccgggttcaagtgatcctcccacctcagccttcccagtagctgggattacaggcacacaccaccacacctggctaatttttgtattttagtcttaacgtgctggtcagactggtctcgaattcctgacctcaggtgatctgcccgccttggcctcccaaagcactgggattacaggcgtgaaacaccatgcccagcccccaattttttttttttaatagagagaaggtctcactcaagcccaggctggtcttgaactcctgagctcaagctgtcatccctcctcggcctcccaaggtgctgagattacaggtgtgagtcacagtacctggccttctttcaagactttaaaaatgccatcttggctgggcacggtggctcacgcctgtaatcccagcactttgggaggccgaggtgggcagatcacgaggtcaggagatcaagaccaccctggctaacatggtgaaaccctgtctctactaaaaatacaaaaaattaaccaggtgtggtggcaggtgcctgtagtcccagctactcgggaagctgaagcaggagaatggcgtgaacccgggaggtggagcttgcagtgagctgagatcacaccactgtactccagcctgggcaacagtgcgagactccatctcaaaaaaaaaaaaaaatgtcatctcactgccttctggtccaatagtttctgatgagaaattggctgttaatcttattgaggaacatttatatattgactagtcacttgtctcttgctgttttaggagattctctatctttgggtttcagcagtttgattataatgtatcagtgtggatccctcaatttataagctacttggagttcattggacttcttggatgtgtaaattcatgtctttcattaaatttgcaaagtttcagctactattctttgcatcttgaaatactagttttgtttctttctgtctgtttgccgcttatggaactttatgcatacattgatgtgcttcatggtgtagcacaggtcccttgggctctaggcatttttctttgttctttttttctttctgctcctcattttggataaattcagctgacctgtcctcaagttcactgtttctttcttcttccttctcaaatctgctgttgaaacttctggtgaaattttcactacagttactgtactttttagctccaaagtttctatttggtttctttctgtagtaattatcactttactagtattctctatttggttagacatggttcttttgttttcctttagttcattatccatggtttcctttatttttaaatttctttttatttagttattaattttttttttttttgaagcggggtttcactcttgtcacccaggctggcaggcaatgtcacaatcttggctcactacaacctccgcctcctgggttcaagtgattctcctgcctcagcctcccaagtagctgggattataggcatgtgccaccacacccacctaatttttggtatttttagtagaaactgggtttcaccacattggccagactggtcttaaactactaacctcaggtgatctgtccgcctcagcctcccaaaatgctgggattacagatgtgagccactgtgcccagcctctttttttagtgtatttaaggtaattgattgaaagtttttgtctagtcattcaaatgtctaggcttcctcaggaacagtttctattaatttctttatttttaaaaaattttttttaattttcttttttttttagatggagtctcactctatagcctaggctggagtgcaatggcttgatcttggctcactgcaacctctgcctcctgggttcaagcgattctcctgcttcagcctcctgagtagctgggactataggtgcgtgccaccactcctggctaattttttgtattttcagtagagacatggttttgccgtgttagccaggatggtctcgatctcgtgacctcatgatcctcctgcctcggcctcccaaagtgctggaattacaggtgtgagccaccgcgcccagcctattttttattttttgagacaaagtctccctctctcacccaggctgtagtgcagtggcacaaccctggcacactgcagccttaaccgtccaggcttaagtgagtctcccaccttagtctcctgagtagctagaactacaagcatgtgccaccatgcctggctggttgtgttgttactgttttagacacagggtcttgctacatttctctgactggtcttgaactcctgggctcaagcagtcatcccaccttggcctcccaaggtgttgagattacaggtgtgagccaccgcacccggcctgttaatttctttatttccggtgaatgggccacactttcttgtttctttgcatgccttgtaattttttgttgaaacctgcacaatttgaagatgataatgtggttactttgaaaatcagatcctccgccctctgcagggttcattgttgctgtttgttgtggattgtcgtttctcgtttgtttagttactttcctgacctttttaaataaagattatattctgtcaggggtgcttgtttctgttcttttaggttagtggttagcttgtgctttgaaagagatttctttaaatatctagtggcaaaaaggataaagaggccgggcgcagtggctcacgcctgtaatgctaggactttgggaagtggaggcgggtggatcacttgaggtcaggagtttaagatcagcctggccagtatggtgaaaccctgtctctactaaaaatacaaaaattaaccgggcatggtggcacctgcctgtagtcccagctactgggaagactgaggcaggagaatcgcttcaacccagggggcggaggttgcagtgagctgagattgcgccattgcactccagcctgggcaacagagcgagactctgtctcaaataaaaaaaaaaaaaaaaaggataaagagtgtcttccatcctttccaggttgcctctgtactggggcaagtccttcagtgtccgccaggctgttcacggcttttcctcagcctttacttcttgctcccatggagcctaaggatgaaccagaggtgaaagttgagggcctcctcaggtgtttctgagcccctgtctagccccagctgtgtgcatggccttctggatttccaagcatgaacaggagctttccaaagcccttagaccttcatgtagctcttttcccagcctcttccttcctaggcttttctgtcagctctttgcccatctgttgttgtccctcccccacaacttcaggtagtatctacctgtaaatgccttcaggccaggcgcggtggctcatacctgttatcccagcactttgggaggccgaggcgggtgaattgcttgaggtcaggagttcgagaccagcctggccaacatggtgaagccccgtctctagtaaaaatacaaaaattagctgggcgtggtgggtgcctgtaatctcagctactcgggaggctgaagcaggagaattgcttgagcctgggaggcggaggttgcagtgagctgagatcgtgccattgcactccagcctgggcgacagagtgagactccatctcggggaaaaaaaaaaaaaaaaaatgccatcaacagcacgaccctggaggctgccccagccctgagagagttcgagggggtgaaacaaaggcaagcccttcagggagacactagaaagatccaaatgcataagcaggattccttgagaaaaggtctgtatcatcccttctgacaccagcaagccacatcagaaatacaggttgccttccccatggctacatgtgagctggtagtagtggctgagcagaaatagcccagctgtcctcctgaaatttagcagggtcttacttcattgagcagtcatctggttcgtagacaccagagttacagaaaagtttattgggaggttttgacagtttaatagaaaaaagtttattgtgacagttttgacagctgaatagaaaaaagtttattgtgacagttttgacagcagaatagttgctttgctggagagacggatctttggagctgccaactccatcattttggtgatatccagctctgttgctgaatttttagctatgctgttttaagttattttcttagtggttgctctagagatgacaatgtacatctttaacttaccacaatgtacttcagattattactaacttaacacttaaagtacagcatttttttttttatggagtttcactctgtcacccaggctggagtgcaatggtgtgatctcggctcactgcaacctccgcctcccaggttcacgccattctcctgcctcagcctcctgagtagctgggactacaggcacccccaccacacccggctaattttgtatttttagtagagatgaggtttcaccatgttggtcaggctggtctcgaactgctgacctcaggtgatccgcccatcttggcctcccaaagtgctgggattacaggtgtgagcgactgcactgagcctaagtatggcaacgtgtctataacatagatctacttccgttgtactatgacatagttccccctccattttcctatagcacagtcccaacctcccttttcctctgacatagttccatcctccctcctcctatgacgtcctcccttctcctctggcatagctccatcctcccttctcctatgacacagctccatcctcccttctcctctgacatagctccatcctcccttctcctatgacacagctccatcctcccttctcctctgacatagctccatcctcccttctcctgtgtcatagctccatcctcccttctcctctgacacagctccatcctcccttctcctctggcatagctccatcctcccttctcctatgacacagctccatcctcccttctcctatgacacagctccatcctcccttctcctatgacacagctccatcctcccttctcctatgacacagctccatcctcccttctcctatgacacagctccatcctcccttctcctctggcatagctccatcctcccttctcctctgacatagctccatcctcccttctcctctgacatagctccatcctcccttctcctctgacatagctccatcctcccttctcctctgacatagctccatcctcccttctcctctgacatagctccatcctcccttctcctctgacatagttccatcctcccttgtcctctgacatagctccatcctcccttctcctctgacatagctccatcccctcttctccttcatgtattattgccatatatacatttatgtatgttataacttcagctcttcagcgttataattattgcttcaaaagtattttgaaagaagttgcctggaggcagtggcttatgcctttaactccagcacttttgggggctgaggtgggcagatcgcctgagccagggagttggagaccagcctgggcaacatgacgaaacccatctccaccaaaattacaaaaaattagtctggcatggtggcacgcgcctgtagtcccagctatttgggggaggatcccagctaaggtgggaggatcacttgagcctgggaagtcaaggctgcagtgagctgagattgtgccactgcactccagcctgggtgcagatcttatctcagaagtaaagggactaggaatggtggcttttatctctaatcccagcactttgggaggctgaggtgagtggatcaccggaggtcaggagtttaagaccagcctggccaacatggtgaaaccccgtctctactaaaaatacaaaaagtagccgggtgtggtggtgggtgtctgtaatcccagctactcgggaggctgaggcaagagaatcgcttgaacctgggaagcggaggttgcagtgagcaagatcgcaccactgcattacagcctagatgacagagcgagactctgcctaaaaaaaaaaaaaaaaagaaaagaaaagaaattaagatctggacactgtggttcatgcctgtaatcccaaagccttgggaggccaaggcaggaggatcacttgaggccaggagttcaacaccagcctgggcaacatagcgagactccatctctatttaaaaaagaaagaaattcaaagagaaaaaaagtatacttgtttttttgtatcatccatattttacctttcttttttttgcccctttttctttcctgtgaatttgagttactgtctagtgtcatttccttttagtctgaagaacttcatttagaattttttttttttttttttgagacaaagtctcactgtgttgcccaggctggagtgcaatggtgcagtctcagatcactgcaacctctgcctccctggttagagtgattttcctgcctcagcctcccaagtagctgagactgcaggcacctgccaccacccccagccaatttttttggtatttttagtagagacagggtttcactatgttggccaggctggtctcgaattcatgacctcatgatctgcctgtcctggcctcccaaaatgctgggattaccatgagccaccacgcccagcccatttagaatttctttttttttttttttttgagatggggtctcgctcttgtttcccaggctggagtgcagtggcacgatctcggctcactgcgagctccgcctcccgggttcacgccattctcctgcctcagcctcccgagtagctgggattacaggcgcctgccaccacgcccacctaattttttgtatttttaggagagatggggtttcaccgtgttagccaggatggtcttgatctcctgacctcgtgatccgcccgccttggcctcccaaagtgctgggattacaggcgtgagccaccgcgcccggctagaatttcttgtaggacaggcttgctagcaaccaattcagtgtttatttgggaatgtctttatttcagcttcattttttgaaggatagtttagctggctatagaattattaattgatcattcttttcagtgtttaaaagtgtcatcatgctaccttctgggttccattgtttctgatgagaagtcatctgtcaaattgtccctttgtacttgaagaattatctttttttctcttgatgttttcaagattttctctttgtctttggcctttagtagtttgtgatgtatctaggtgtggatctcttggtgtgcatcgtatttgggcttcagtaagcctcttagattcatagattaatgttttgttttgttttaccaaatttggagagtttttactcatcatttcaacaaatttttttcctgcccctctctcatctccttttgggagtaccactgcatgtatgttggtgtgcgttctctaaagctttttttttttttttccaaccttttttctccttattcctcaaactggattatttatttatttatttatttattttttaattttttgagacggagttttgcttttgttgctgaggctggagtgcagtggcgcgatttcggctcactgcaacctccaccaccttcgaggttcaagcaattctcctgcctcagcctcctgagtagttgggactaccggagtgtgccaccaccatgcccagctaatttttgtatttatagtagagacgaggtttcaccatgttggcaaggctggtgttgaactccggacctcaggtgaaccacctgcctcagcctcccaaagtactaggattacagtcgtgagccactgcacccggccaggataatttttaatgaatttttttcttctgccatctcaaatctgccgttgagtacatctaattaattttttttttttgagtcggagtctcactgtgtcgcccaggctggagtgcaatggcgcgatcttggctcactgcaacctccacctctcaggttcaagtgattctcctgcctcaccctcccaagtagctgagatgataggcgcccgccaccacgcccagctaatttttttgtatttttagtagagacagggtttcaccatgttggccaggctggtcttaaacccctgacctcaggtgatccgcccgcctaggcctctcaaagtgctgggattacaggcatgagcccggccttgaatttttttttaataggctttttgtttgtttgtttgtttgtttttgagatggagtcttgctctgtcgcccaggctgaagtgcaatggtgcaatctcggctcactgcaacctccgcctcccaggctcaagcgattcttatgcctcagcctccccagtagctgggactgcaggcaccctccaccacacctggctaaataatttttgtagttttagtagagacaggatttcaccatgttggccaggctggtcttgaactcctgacttcaggtgatctgcccacctcggcctcccaaagtccagggattacaggcatgagccactgctcctgaccatggctttagtttttagagtagttttaggttcacaacaaaattgggtggaggatacagagatttcacatatactccagacccccacacatgcaacagcccctccccacaacaccatcatgctccctcaccagactggtacgtttattacaatccataaacctacacagacccatcattgtcacccaaggtccatagtttacattagggctaactcttggtggtgtacattctatggactttgacacatgtataatgacaggcatctactattgtggtatcagacagagaagcttcacaacctcattctctgtactttacctgttcatcctgccctccccactacattcactaaaaatgtcctttcagtgattgtcctttttaactctggaatttccatttgatttttttttttctttttttctttttttttttagacagagtctgcctctgttgcccaggctggagtgcagtggtgccatctcggctcactgcaaccctctgccttctgggttcaagcagttctcctgttttagcctcccaagtagcagggagtacaggctcatgacaccacgcctggctaatttttgtatttttagtagagacggggtttctcaatattggtcaggctggttttgaacgtttgacctcaggtgaggcacatggtgaaaccccatctctactaaaaatataaaagttagctgggcgtagtagctcacacctgtagtcccagctactccagagactgaggcctgagaattgcttgaacttgggaggtggaggtgcattgagctgagatcatgccactgcactccagcctgggtgagagagtgggactcggtctcaaaaaaaaaaaaaaaaaaaaaggattctctatttcctgaatcattgccatcatattttcatttaattatttgaacatacttatagtagctgctttgaagtctttgctaaactcaacatctgggcccactcagagtcagattatatcaactgctttttttcctaaatatggatcatggtttcctgtttacctgtcttataattttttttgttgaatactggacatttcagatgatctatgtctggattctgagttgttttcctgagtcttgtgttctgtttgttttagttaagttgtttggacttaaactgcaaaacttgcccacccacccctgcagcctctgatatctctgctcagatttttaaattcttttttttttttttttgagatggagtcttgctgtattgcctaggctggagtgccagtggtgccatctcagctcactgcaacctccacctcctgagttcaagcaattctcctgcctcagcctcccaagtagctgggattacagatgtgtgccaccatgcctggctaattttttgtttttttagtggagatgaggtttaaccgtgttagccaggatggtctcgatctcctgaccttgtgatccgcccacctcggcctctcaaagtgctcggattacaggtgtgagccaccacgcacggccttaaattctattttttagtctggcttcctagcagttgcttctgtgtttgcatatggtagtggtcagccagggatttgggcaagagggtgtgctcaaacactcctaacccaaaaggctccccaccacaccatgtggtttcagagcacgttgtgagttcagccagcccctctctctttgctttcacttcaccctggcctctcttggagctcccaacacctgcagtggtttcctcaagagccaggcccttcctgggagagctgagcccttctgtggctctcattttcagagtcttcctgttaagtatctggctggcccagtgctcactccagctgggatcacagccccaaatgatcagggctgtcagttttctttgtaagtgtttatcgagtcaccacttttaactacgaggcctgggttttcccttctgtcccacatccacctctgctgctgctggtttttgcagccagccttgacctggtaaatcactcagatttgctgactcaggagtaggagccaggggcagccccaggtgcaaaggctgtagacttcccagtattctggcccaaggcccaacatttttcaagaagaatctcttctcagtgagttctcagctttggtcagtttccagaactctgaaaagttctaaatcagtgagttttgataattttgtctagttttagattattttttctttttttctttttttttttttttgagatggagtctcacttcgtcacccaggctgaagtgcagtggtgcgatcttggctcactgcaacctctgccttttgggttcaagcgattctcctgcctcggcctcccgagtagcataattataggcgcacgccatcacaccggctcatttttaaatttttggtagaggtggggtttcaccacgttggccaggctggtctcaaactcctgacctcaagtgatccgcctacctcagcctcccaaagtgctgggattacaggcgtgagccaccgctcccggcccatattcgattcaacgacctctctacttgagtgtggctggaactcagaagcttcttttagttttagatgttgtttgttttcagggttaagtctttactaattctggaatgtatttctgtcaatgctgtgaggtaggtgattgggttgggatcttttatgtatgaaaacccagtttttaattttctcttgtgaaatccatcgtctttctccttgcaccccatctgtgatgcttcctctgccacacgaggctttctgtgtgagggggggctcttcctggaggctctcttttgctccattgatcgatttgcctgttctcttggttttcagttaacttcatggatatgccattaacttctctccatggttagaaatttaggttatttccaagtttttcatatttggttaatatctttgtggccaaatctttacatacattctccttaaaaatcatgtcactgaggcggaaggattacatgagcccaggagttcaagaccagcctggccaacatgacaagaccttggctcaacaaaaagattcaaaaattagctggcatggtggcacactcccatagtcccagccacttgggaggctgaggcaagaggattgcttgagcccaggaggtcaaggttgcagtgagctgtgatcctaccatgcacttcagcctgggcaagagagcaagactctactgcgcacacacacacacacacacacacacacaaaataatagaagcactttctgggttaaagagtttacaaatttcaaggcttttaatattgtcaaatattctagaagaggttttactaatgatggtgtgggtgtgctgaaggggcgtatttaatcgaattcactctgggtttaaccctctctttttgaacatgttctcagtctcctttcagccagtctctgctgcagtgcatttgaggcacagtcctgtagcccctggcgcccccggtcattggcagggccctgtgtgcctaagaacagtaggcactagaaggaaccgcccaaaatcctggcctggggaggtgtacgaggccacctttgtctacgcatgagacaaaatccctgttccacctcactctgctccacccacccgttcctactggaaagacagccttggctccatgtcacgggctgaaggcctgtcctcagttgctccttttttgtttttttgagacagtctcactctgtcttccaggctggagtgcagtgacacaatctctgctcactgcaacctccgcctcccgggttcaagcgattcttgtgcctcagcctcccgagtaggtgggactataggcacgcgccaccacacccggctaatttttgtatttttagtagagacgggtttctccatgttggccaagctagtctcgaactcctgacctcgtgatccacccgtctcggcctcccaaagtgctgggattacaggcgtgagccgctgcacctggcccctcagttgcttttgtggggttgaaagaacttcctttttgaaacgatggcatggcagcagtggatggcggttggtttttcatgtctttatttggcaaagttgaagattgcagttctgtctgtccccacatttcctcttcattctctctctctctctctctctctctctctctctctctctctctctctctgtgtgtgtgtgtgtgtgtgtctcggttttggttttaattttactggttcactgatgcctaaaagtcaaggcatcactatttcataagcaggttctcctagtttgggggaggactcagtcatgcacatacacacccccagcacatctgccttgatgcactggtgctgtggcctgtgcagtagtgaggctgtgggagctgctgtcagaaggctgctgccacactgtgactccagcagaggcgatgggacacacggggcatattctggagcagccaagtccatcccgagagagaatgcgggtgtctgtgtgtgtgatgtgtgtgagactgtgtgtgtgtgtgcatgtgcatacatgtgtaaagtgtacagttggcccttgtgtgtgtgagattgtgtatgtgcatacgtgtgtaaagtgtacagttggcccttggtgtgtgtgtatgtgtgcatgtgcatacgtgtgtaaagtgtacagttggtccttggtgtgtatgtgtgcatgtgcatacgtgtgtaaagtgtacaattggcccttggtgtgtgtgtgattgtgtgcatacgtgtgtaaagtgtacagttggcccttggtgtgtgtatgtgtgcatgtgcatacatgtgtaaagtgtacagttggcccttggtgtgtgtgtgattgtgcatatgtgtgtaaagtgtacagttggccctgtgtgtgattgtgtgtgcatatgtgtgtaaagtacagttggccctttgtgtgtgtgagattgtgtgtgcatacgtgtgtaaagtgtacagttggcccttggtatctgcaggttccatatccatcatttcaaccaatctcgagttgaaaataattggggaagaaaaggatggctgcgtctgtacactgtataacaactatttacatagcatttacatcgtattaggtactgcaagtaatctagggatgatttaaagtacgtgggaagatgtgcgtaggttatatgcaaacactatgtcattatatataagggacttgagcatccttggattttggtttgcacagggggtttcccatggataccaagagactacgtgtgtatgcaagtgtgagtgtgtatatgcatgtgtgtatatgcatgccatgtgtgtgcatgtatgtgtatatgcatatatgagtgagtgcacgtgacagtctacacgtgagggtgcatgtgtgtgcgcgtgtgggtgactgcatatgtgtgtgcatgtgtgggtgcgggtgcatctgtgtgtgcatgtttgggtgcgggtgcatgtgtgcgtgcacgtgtgtgtggatgagaggtcgcatgtgtgtgggtgagggcgtgtgtgtgtgcatgtgtgtgggtgagggggcatgtgtgtgcacgtgtgtgggtgaggtgtgtgtgtgcatgtgtcagggtgtgtgtgcgcgcatgtgtgtgggtgagggcctgtgtgtgcgtgtgtgtgggtgagagatgtgtgcgcatgtgtgtaggtaagggtgcttgtgtgcgcatgtgtgtgggtgagggcgtatgtgtgtgggtgagggcacgtgtgcgcgcgtgtgggtgagatggcgtgtgcgtatatccatgtatgactgcatctgtatttgcatgagttcatgtgtgagtgcatgtttatacgcgtgtcagggtctctgtgtatgtgtatgacgtgtgagtacatgtgttaatgtgtgtgtacatgtgtatatgcctgtgtgcatgtgtgtatgcatgtgtatacatgtgtacttgtgtatgtgtatatgtgtatgtctgtatatgtgtgtgtatgcctgtgtacgtatgtatatgcgtgtgtgtatgcatgtgagtgcatgtttatgcgtgtgtatgtgtacttgtgtgtgcctgtgtgagtgcatgtgtgtgtacatgtgtatatgcgcgtgtgcgtatgcgtgtatgtgtacgtgtgtatatgcatgtgtgtgtatatgcctgcatgtatatgcacaagtgtgtatatatgtgtatgtgtgagtgtatgtgtgcatgtgtatctgtatgtgcgtgtgtatatgtgcatgtgtgtatgtgtgcgtgagtgtgtgcatgtgtgtgtgtatgtgtgcgtgtgtatgtgtgtgcgtgagtgtgtgagagtgtgtatgtatacgcacgcgtgtgtgtctgtctccctcaggacagtgcccaggcggatgggtcagtgctcctgggttggtttgcccctggtggcccatgtctgagccctgccccttacggctctgtctgcaggttctcccatgggcaggtggtctctctggatgagctgcgccccttccaggacccagacctgagctccctgcaggccggctctgcgtgtctggccaagcaccaggatggcctctggcacgcagcacgcatcaccggtgaggctggccgtgggggcctcccgggaacaccctcccaggccccacgtgtgttgtcactgtgtggctgctccctgcttcctttgggttgagtgtcgggactctggctctgggcccgaaatgagcacacctaccctcagcctctgccctgccttgctcctcatgtccagggtggttcccttcagtggcacctgctgtcaaggattctgacctgcagcttgtctctgcccccagatgtggacaacggctactacacagtcaagtttgactcgctgctgctgagggaggccgtggtggagggggacggcatcctgcccccactgcgcacagaggccacagagtccgactcagacagcgacggtacgggtgactccagctatgccagaggtatggcagcagctgcggagcccaggagccaggaaggtggggtcaccctgagaggctcctggccggtgagggcaccaaccatctaaccaaactattggagagtgtgtgactgcggcgagggtgccacctgtgcctgaggaggccgtgtgggtaggggtagatccgtggcggcctttatcttcaaggagtgtgggtgcaacagctacagtctcattgatgggaggccatggtcgtggctgtggccatgggagaggaggggcctggagttgccgaggaagtcacagaaaatgaccaactgatggggcctggagtgcaggaggggcagctcctctgcatggcttctcagacttgggacctgggtgcctgggatcctggcagacagaggttgtgtccagacagccagcatggaagtttcgggaatgggaactggtgggcagtgtccagctctccagaggggtgtgtgtatgcgtgtgcgtgtgtgtgtatatatgtgggaggtcacctgacccaagcatggcgggctgagtccaggaggggtctgcatgttggaggtgtacccagggatcagtgatggtggtttctgaagccccatgtccctggtgaaggaggactgaaccaaggactctgtgagggcaggtgaggcgctcacagcctcgcgaaggtggagaagggcaggggcaggagagggctgcggaggaggggccacggtgcagcaggccgtggggactgccatgcactctgcctggtgtcacatgcccacagcagcctcggtgacgagagcacggagcccaagaggtggggtgtcgtggctctgcccaggatctgagctcattggtcaaagcccgggtcaccatgcacaatcctctggcctggctgggccactgccctctgtccatctcttgcagtggtggggtcggacgccgtggactctgcacagtcctctgccctctgtccgtctcttgcagtggtggggtcagatgctgtggactctgggacctgcagctctgcctttgctggctgggaggtgcacacgcgaggtataggctccagactcctcaccaagatgggctatgagtttggcaagggtgagtacaagctgccctggagaagtgggcaggctgctgcagcatagcccaggtccagcagccatcaggttcccggggtcccgcagccatcgggttcccagggtcccgcagccacagcactgccatccccgtgctcctcagattcccggggtcccgcggccacagcactgccatccccgtgctcctcagattcccagggtcctacggccacagcactgccatctccgtgctcctcagattcccggggtcccgtggccacagcactgccatccccgtgctcctcagattcccggggtcccgcagccacagcactgccatccccgtgcctccgcaggtttgggccgacacgcggaaggccgggtggagcccatccatgctgtggtgttgcctcgagggaagtcgctggaccagtgtgtggagaccctgcagaagcagaccagggttggcaaggctggcaccaacaagccccccaggtgccggggaagaggggccaggcctgggggccgcccagctcctcggaatgtgtttgacttcctcaatgaaaagctgcaaggtcaggctcctggggccctagaagccggggcggccccagcggggaggaggagcaaggacatgtaccatgccagcaagagtgccaagcgggccctgagcctgcggctcttccagactgaggagaagatcgagcgaacccagcgggacatcaggagcatccaggaggctctcgcccgcaacgctggccggtacgtgtggggcccagctcagggcaaagggcgacccagggtggccctgcccccgggatacatgctggaggtcacctgacccaagcatagcgggctgagtccaggaggggtctgcatgttggaggacgggcagcgggcacacaggcagtgggtacggcagactggggttggtggcatggcccaggaccccacgctgactagtgagcccctccgcaggcatagcgtggcgtcagcccagctgcaggagaagctggcaggagcccagcgccagctggggcagctccgggctcaggaagccggcctgcagcaggagcagaggaaggcagacacccacaagaagatgactgagttctagagaccccacaagcactatggacgaagcgtgggaccccagcacgggctgccctcaggaagaccagtgttgcccgaggaggggccggcctgctggcctggggcgtgcagacactgctgagtggagacagagctgcggggtcccatctggacacttacttgcccacctgccagtgtcttgggcatttccttggcaaggacattaaagtgatttcatcacagtgtcattcagtggagatcagctggctgcagggtctctggggagagaagggtctgtgcagggctgtggtgagagacgggctgggctggaggggcctaggaggccggcattctcccttcttacccttctctgaccaaggcagatcggaggccagggtgcccgccaggctgcctgacacccacagatgggtggagctcagtgctgctccagcgggcgagacgggcgggagaggactgtggcccaccacgtggggcactcttggtgaggcaggcggacctggccctgtgggtttgggggttctgtgccagctctgctcacgtcttcgtgtgtggaggggttgtgagttaggctgtcagaacagtgcgggctagaggcgcacacgtttcatctaggcttcgggcggggcgcagcaggtgggtgaggctgcggtggtggctgctgcccagggtgggaggctcaggggaggcgcttggcgacaggagcaggaagtgatgaggtggggagctcagccgagggctgcacaaagaccttcctggcctgccccagacagagctgaggacccctggccgtgggcttggtaagtgccctcctggggggcagctggggtctgggaggccttgggatgtggctgcagctgggtcagtcagccaggctgaagcccactccctgggtctgagcagactggccccaaactccagagaccacccctcaccccccagcttctgtctctgctgctggactgtgctgtttgtaaggcatcccccaccccgagaagttctgctaagatccccaagaaggggacagatcctctctggcagagacactggcagacaagaagagccagagagaagtggggtgggggcatcagcacccccagcagctgctgctgcctgctgacccagcctccagctcctccgggtgcagggtccctcctgctgaccagcctccagctcttcccagttctgggctccgcagcgagcggcttgggggcactacctgacacaggagaccatgtctgggcagagggtggctgcaggtggagtctgtggcctgtggcgcacacccaggggctcccccgatgctggttactatctgggctatggtggccacagctgtcttgcccctcctcacggccgtgctgggtgttaccgtggtcacccgcagggacacggaggggccaggcagagcagccctagttcacctcaccgggagcccccgccagaaggtgggcacctctgggagggagggactgccaggccttggggcttcctgtgctgagtcagagctggaacgggagacgcaggagccccgcagccgcgggaggtgcagatttggggctgccaggtggcgccaggtccccttggccagcccccagcgcccctttcttctgtccccagggcctcggcttcacaggatggggctgccagtgtcctgggcccctcctgccctctgggttctagggtgctgcgccctgctcctctcgctgtgggcgctgtgcacagcctgccgcaggtaggtccctcagccgcgttctgtctggggcctcgctgcggctgccattcacagcccagcgcgggaaggggctggaggcaggtccgcgcacccagctcggcacgcgcgcctgcaccgggccttggacccgaggctgacgaccccgccccccgccccccacctctacccccaaggcccgaggacgctgtagcccccaggaagagggcgcggaggcagcgggcgaggctgcagggcagtgcgacggcggcggaagcggtgagtgccaggctgtcccggggaccagggtggggtccgcagggcaccgaccagccttcctcgcccccagtccctactgaggcggacccacctctgctccctcagcaagtcggacaccagactgcacgagctgcaccggggcccgcgcagcagcaggggtgagcagagggcggggcgggggcggccgggcggggcttactgtgcagcgcgtgccaacccctgggccagacccgctcctgccccctgcccggagtgaactctgccctgaccccacccccagccctgcggcctgccagcatggatctcctgcgcccacactggctggaggtgtccagggacatcaccggaccgcaggcagccccctctgccttcccacaccaggagctgccccgggctctgccggcagctgcagccaccgcagggtgcgctggcctcgaggccacctattccaacgtggggctggcggcccttcccggggtcagcctggcggccagccctgtggtggccgagtatgcccgcgtccagaagcgcaaagggacccatcgcagtccccaagagccacagcaggggaagactgaggtgaccccggccgctcaggtaacgtgggccagggtagggcgctgtgggtggggccggcagatcctcagcaggttggatggtgctgacccctcctcgggttggcttcctgtctccaggtggacgtcctgtactccagggtctgcaagcctaaaaggagggacccaggacccaccacagacccgctggaccccaagggccagggagcgattctggccctggcgggtgacctggcctaccagaccctcccgctcagggccctggatgtggacagcggccccctggaaaacgtgtatgagagcatccgggagctgggggaccctgctggcaggagcagcacgtgcggggctgggacgccccctgcttccagctgccccagcctagggaggggctggagacccctccctgcctccctgccctgaacactcaaggacctgtgctccttcctccagagtgaggcccgtcccccgccccgccccgcctcacagctgacagcgccagtcccaggtccccgggctgccagcccgtgaggtccgtgaggtcctggccgctctgacagccgcggcctccccgggctccagagaaggcccgcgtctaaataaagcgccagcgcaggatgaaagcggccagcctcgcagcctgctcttcttgaaagctgggcgggttggggcggggggcttctctggaaggcttggagctgtcccctctggccttgggggactggctgcccccggggcgcccgggcctagccgaggcggtgctcctgccggccagactctcggtcagtgcgggcacggggtcccagccactcctagggggcagcgcagccggcagggtggccgcccccgggtgggacttggaccctggactccacgggagggctccgccacccagcctggtgttacataaggggtggtggaggtgggcagtcgagcgttaaagagtaacctgctgccgggaagcccgccaagcaatcgcggccccttccccggctctggcagctctgcgagcgcgcccgtggggaacgggccctccccggcggggcgcgcgggcgcgcgaggtgggcggaggcctcggagctgtgccgggccgggcctccctccctaggccagcgcgggagcgacccggagggggcgggcccggggcggggcctcgaagcgctggccggcgggagcgcggccggccgggcccgcccgcctgcggtgtggacgccgcgcggccaatgcgcgcgccgggacgggacgggacggggcggggcggggcgggacgagacggggcggggcggggcgggccgggcagcctccgggcggcgcggcgcgggcggcggccggatccagggcgggggtcggcggcccggccagcccggcccggcccggggccgcgtcctgagagtcagccctcgccgctgcagcctcggcgcccggccggccggccatggagcgccccccgccccgcgccgccggccgggaccccagtgcgctgcgggccgaggcgccgtggctgcgcgcggagggtccggggccgcgcgccgcgcccgtgacggtgcccacgccgccgcaggtaccgggcgccggtgggcgggggcgccgaccaagtttctctcgctgcaaagatggcgtcagtgctgcccaaacttcgggcccccgggggcggggcagcggggagggcggccgcgtcggtccgcgcgtgtccgtgggtcccgccggggctgcgccgggcggccggggagcccttcccgccgcgccgggctgggggcggggccgggggcggggccgcgccgtccacaccggccgcagccggttttcgaggcgggcgccgagcggatccgcggcggaggttgagggacccccctcccccggccaccgcctccgctgagtctgccccctccccatccgcagggctcttccgtgggcggcggcttcgcgggcttggagttcgcgcggccgcaggagtcggagccgcgggcctcggacctgggggccccccggacgtggacgggggcggcggcggggccccggactccgtcggcgcacatccccgtcccagcgcagaggtgagcgggaggcccggtgcctcgggactcggtgtgcgcaggggcggtgggtggggtgcggagacaccggccccgacggaggccaggtcagggccccaggtttgtaattaccagccacccccaagctcttcagccctggaggagctgagcagaaatgatcgatgactgggagtccctacacctccctccaccgcagttcctcggggctagagctcagaacccggagcgggtggctgtgcgtctctgtgcagaagaggctgcgcggtcggcatggggcgactgtccaggaatccctggggctcctgaccgccacctcccaacccctgccaggccggacacctcggtctggctgccagggcaggggcgggccctggcctggctcgctggggcctggggagctgcccgtgcttccagcccagtctccccctggctgctgccggctgctggccactcccacctcccaggcctggcgtgaggcccacagctgctgttgcacaaccctggttaatgtgtgatggggggaggcctgggcctggcccgcccctctgccagggcttcagacccctgcccagccccagtatctgaaggaaccacagtggagccaagcccgcgatgtggagaactcaggcttcaggagaccctggccctgctcctggcggctccgggtggctttcagctctctctgcaacctgagctgggggaggagccaggcctcatgcccagggctgggagtggggagcctggtgtgcacgcgtgcccaggcctgcacgtggaccgaccaggggaggggcccagagctctggctgggtcacccgcaccccgcccccatctcctccagagccaccccaggaaaagcccggctggacgaggtcatggctgccgctgcccttacaagcctgtccaccagccctctccttctgggggccccggttgcagccttcagcccaggtaagactcagatgtctgcatttaggggtgtgggtggggacagggctcagaacctacagccacccagcctctgtggggcaagcagagccctcaaacctgggactcctttctaaaatggactcccgcaccctcagtgccccctactgaggccaaagcggcaggacccaggccttctggcctccctgacctgctcacctccacgcggctggccacacacgtctgccaaccctttcctgtgccgggggggtttctccccaagccctggggccagctcctccaagacgctctgcccaccagtctcaccggacttggtgaacaggggcagctcaggattagggactccctggacccacccgaagttctaaggcggggggcccgtgtccccacagagcctggcctggagccctggaaggaggccctggtgcggcccccaggcagctacagcagcagcagcaacagtggagactggggatgggacctggccagtgaccagtcctctccgtccaccccgtcacccccactgccccccgaggcagcccactttctgtttggggagcccaccctgagaaaaaggaaggtgagcttgggggcggcccccagggaggggcgggtgtggcggctgagcctgaccctggcccctgttgctgcagagcccggcccaggtcatgttccagtgtctgtggaagagctgcgggaaggtgctgagcacggcgtcggcgatgcagagacacatccgcctggtgcacctggggtgcggcggggcctggggtgcggcggggcctgcgggttggctggggttgtgaggcccggccaggccaccccttcagctcccactggctggctgtgtctcccgcaggaggcaggcagagcctgagcagagtgatggtgaggaggacttctactacacagagctggatgttggtgtggacacgctgaccgacgggctgtccagcctgactccagtgtcccccacggcctccatgccgcctgccttcccccgcctggagctgccagagctgctggagcccccagccctgcctagtcccctgcggccgcctgccccgcccctgcccccgccccctgtcctgagcaccgttgctaacccccagtcctgtcacagtgaccgtgtctaccaggtgggtgaggccacgggtggcagctggggcgggtctcagggctctctggaggggagtgaagccctggctgtgtctccctgtagggctgcctgacgcccgcccgcctggagccgcagcccacggaggtcggagcctgcccacccgccttgtcctccaggatcggagtcaccctgaggtgcgtgtgggctgagggcctgcggctggcaccaggtggggagggtcctggtctcacagcaccccatgtcctgtgaccccccgcacaggaagccccgcggcgacgcgaagaagtgccggaaggtgtatggcatggagcgccgggacctctggtgcacagcctgccgctggaagaaagcctgccagcggttcctggactaagtccggctcgttcaagaacataagctaccaccttctccctccccaccccctccaggcccggggctgaaacagcccgaggacagccccaggggctggctttcaccagctgcagggtctgcttttacttggggtgggggggcggggctgaccctgaaccctcccccccgccaggtcggggaggggtcccaccactcaaagtgcctctaaagaaaccagctttttgcactaaagccaaaccacaccgctgtccccttagccccaagggccctgggggcagccaccctcccgcctgtcggcccgtagatttatcaagggtgttatgggcccagctttggggggccagtcccgatgcactttgaggggtgttggagaggggactcccccactcgcacttaactcaacggctctcgggccctggggctgtttttaccatgtttgtttttgaagctcaggtgtctcacgtctgggctgcaccaggcgaagagagaaattaaagatttgaggtttttccagaagctttgtctgcctctcgggaggaaggccgtggggctgggaccctgtggtgggcaagtgggtggagtctggcagctgcccacagagggccgagggtcacccgtcggccgccgccaccccaggcgaggccggaggaaggatcatctgagacgcaggaggcatctgctggagcagcaatttcccaatttattgaaagtgatcgctttgcaaggatgtctaagctaatcccgtcacagaaaggaaacgcacaggcgcctaggcagaaacttggagactcaccgcagaggccacgtgaacccacggccacagagaggcaggacggcagagccatgatttcccaccgagcgattacgagaacctcttcccccaatagtagacacatctccaatacaaacacaggtttataataagtaataggaagtcaatataatatagattatccccagaaaaaaatcaacaatcttcaaacactgccctttttttgtgtgttttgtttttgttgacaggttgaaagcatgttgaaaaaaataaatatttaagaaaagcacacacagcaccctcactacaagtagttctaaaagggctgcatacaaaacacaatataagatctaaaaaaaaccaccaccattaagtatggctttcttaagagtcgcacatgtcacagaatgagctaaaataagattacttcttttataatattgcaaaaagttccagtttttgcattttctcagttttttaaagaggaagatgtgcaaagttggaagcagtaagctgcgtcttctgagtcagttccctacgtagccctggcagtgtcctgtgtcccaaagctcagagagccccagtgtacaacctggtcaggatccagagcttgacagaaaaatcgtggtgtccctgccccctccccgcccccaaataacaccatccccaatggactgtatttcccactttggtgttgtaaacaccaaaatacaaacagacacaaacaaaaatacaaaatgtgaaatgtaatctacacatttttcctcttcataaaaaaatatttattagtttgaacatcgatttaaaaaaaaatcagtcacataaaaaaaacccttcatgacatgtcttttccctccacgcctcctgagatggacgtgctcacctgggcctcggaaatcccacactcttcagtcggcaaactgcgaacaagaacaggaaatctgccacgcagcaaacacttggggaggtcagtgggacactgttggttttagggaagaaaatgcccctgtagctccggcggggaaccccaaaacggtcagcaaaggcaggccacacggagtgagccggccagatggagcaggacatcctgagtgtggagggggaggcgggcctgggtcctgggcagggtggcctgagagcagggactggtacaaaacccagagacattggtgggtagcaaaggtctggtttccaaatgcattttgtaagaaagtcagtctgtttagaaaaagggtttaaaaatcaggggaaaggtacaaagttctgagaattctcaaagaggccggggtggggctggcctggggtgagggctggagggctccgctgcagctccctggtagccatgctctccccctgggggactcgtgccagagccacccaccttgctcggtaagagtgggcagggctcaccgctgaggggccagcgcttggcccggctcctatccccacactccgtgtgcagaaaaatcttggcctctttctccagctttgaggagcccacagcctccgagctgaggggtgtgtgtgatgacagctccagccagggcaccctgtcattggtagaaccgggggccaatgtcaaaaaacaaaagccgtgactcctgcgctgtacctggagtcctccatgtactcctccacaggacccccggccagccccagccctccccgagcagcagcggtcagggaagctggtgctctacctgacaatgtggggaaaagcctggtatacaggctagaaaaagagagtaaaaactctttccacgcagccctgaagctcagcactccggggggtcttcacacgggcaggtcctggagggaaggaggaggccaccgcgcccacctcccatctgaaggcacagcaccgcagtggtggcctgtgccagaggagggggtgaaggatggaatgtcctcatggtgagtgctgtcagaggcaggcctgaacgagaagacaggccgtggcaacggtcccgaggctgtgagtctaggcagcctgcctccgggacccccaaagccaggcggtgcaccacagcacacaccgtgggacctttgcttttcactcaggaaaagaaagaacatgtgagtgcttctgaaaacacagcaagaggacttgagcacaagctaaaggaaaaacaaccctatatagtttcttcgagtgagaaaaataatgccaaacaaaataattttatgtaactacctcgatatgtctctgactacttaaaaatttggttacccacgcggggaggtgtaagcagcacactgcagttaggaacaccgcctccagtgttagcagcaaaggcaggagcccagctccagcccgtccaggaggggtcagcaggagcggccgggctgggccatgggcagaacaggacgggcagagcccggggtggacgtggcagcccaaggctctccgaggaagtgcacacgactgagccgaggcccttgcagagggaacctggtgtggcctgaagtggtggggggcacagggctgagggtcccctcctggaaggagcccccagggctgtgtccacctaagatagcacctggagccctcggcctccagcagggtctgcagctgtgttgtgtgttaagcaccaaagcccagaggtaagacggtggcagggctctctgtgcacctggattctacaggctgccatgggccacggctgcaccacgggccacggctgcagccacaggcagtgacctggctgctaggggaggggagggcgggctccagccgggctgaccgggtgtctgtaaaactctgcacctgctcaggccaggggcctctgggccgaacacaccaccccgcccagtgcccactggacccggccacaggcccatcacgtgtccaagccaggctggccatcacaggggccactcacacacccgcaccacctgctggggacttaggaccgtgctctcccttcactcaaacccaccctgtgccctcccccaactcacttcatgtctggtcccagagcacccctcttgctggggtcgcacctgcttagcccgcagggctggtttccgtggggggtgggttcagggggaagcagaggaggggccgcgagaggggtgagcgtggccctggccccgcagtggagacccaccggacacacacacgggtggacggagcgaggcagccaccgaccctgccggcgggcgggcctaggagagccaggcgaagtccttgtcagggcctcctggggggctgcgcggccgcggcgagtcttcctcatccttgtcgtccgccaacagcgcatcctcaggggccaggccctcgtcgtcctcgcccagctcctccgcctcccctcgtgggtcctcagggtcctccagatagggcccgtcgcctgggaacagcgcctctggagagccctcgccgcctccgccgccatggtccaggggcccggccatgccgcggccagcacagtcggtgcacacaccgtggcgcctggagccatgcctgatgcccacgctggcggcggacatgaagacgcggctgcacaccttgcacacatacttcttgtccttgctgtggacctgcagaggcagggcagggggtgagcagggcctggtgggttggggggcggggcagggggtgagcagggcctggtggaggtggggggggcaggtggtgagcagggccaggtggaggttggaagagggggcagggggtgagcagggcctggtggaggtggggggggcggggcagggggtgagcagggcccggtggaggttgggaggggggccagggggtgagcagggcctggtgggtggggggggtgcgggggtgagcagggcccggttggggttgggggggcacagcctcccgggccctccgagtgtctgcacaggcagagactcctggtgggggaggtgcgcagacaggagtgctcagaccttgagccccagctcctatcagagccacacagcagaactgcaggtggcaccaaggcagccctgtcccaaggggatgctggcacgagggcggcagtgcccctcccccgcaaacccagcccctaggtgggccagtctcagcgtctacactgtgtgtccaagcacccccaccagaggccccctgggttgacacacttctcacgggggtcacaccaccggcctctgcctaaaagcctggcttcctccaaacctccctgcaggacaggctgagggccccgcattggactggagctcacagagctcttcctgtacccagccgtacagggacgggccggggttggggctgccagccgggcaggtgggcccacacctcagcctggctgcgtggacaccccctcagcccctgaccccctcagtccctgacccctcagcccgaccctgactccaggaacgtgtaaaggaggcaactcccccactctcaggctgtttcaaggtcgactgagacatgcaagaagagagatgagcacttatggtcagaggaggaggtgtggctgccagggagggcagtcgtgctgtgccctgtgctgggcccggcagggagatggggcagcaccctgaagagggcccatgtggcaggacgcgaggtgctgggttcctggagggtctcagcactggcctcaaggcctgagggaactaccacacactgctggggacatgtggccccaggtgggcttccgctgagggtgggtgtggacacctgtgctgtgcagaaccagacctcagacatggccagggatggggagaggtggcccttgtacccactcacgggcaccctcggccacgccagctagaggaggccttggggggctggccctgatccctcacagcacagcccctgtctctgccctccaaggaccgagagggcaggacccacagaggaccccaatagcaacccctggcccctggccaagtccacacgaggggcttctctgaggtgggctggcctcaggtcagtcctccaggctgaacccggcaatgaccccaggctcccctcggctcctccctccatccacagggctgtctcccggggcctgcagcacctctgaggctgcacggagaactgaggctgggatgtgcttgtgagtttagctcttccttaaaccattccaaactcaccagttttctcccatgagcaagtacatacataatcaatgtgtgtcatggcggaagacggtcctgctacacttgcaaagacctctgacgggcaggcaccacagctaccacctccccatcctggggctggacccgggcccttacgtacttcctgcctcagtgttccgaatccacaggccgacaggccacccagcacggcccgacctccccttctagacccgcttccttgagggcagaggtgcctgtaacttcttccacaaagccgggaaccataaagacctcacttctcaaatgtctgcttccagagcaactgtgtgagctctaagcctggaccgggatgggcgctgtccagggatgtgagaccttcaggggcagctggtggctttcagggccagggcagcaccacacagcacacctcagatgcccaaacacgctaaccctagaaacagagcctcagacaacttggtgccagaactgctcctttgggcttttgttttgctgtattttatttatttatttttttgaaacagagtctcgctctgtcacccaggctggagtgtagtgttgccatctcggctcactgccagctccgcctcccgggttcataccattctcctgcctcagcctcccaagtagctgggactacaggcacccgccaccacgcccagctaattttttgtatttttagtagagacggggtttcaccgtgttagccaggatggtctcgatctcctgacctcgtgatctgcccgccttggcctcccaaagtgctgggattacaggcgtcagccaccgcgcccagcctgttttgctgtattttaaaccaaggacttccagaacaaaaattcaagacaagccacagtagaaacttcccagcacagtaacctggtgcacacaggcccaggaagggttggagcggggctagtgaaaaacactgaggccccttgaggcctaggctcccatgtgtgcaggggccagggcacctgaggaggcagcaggggcagcttggggtggcacagggaccatgtggccagggctggatggctgggaactcatgcaaatgggcaaatgccctggaaggaagcaagaaggaagacgggacaccttggcagcccgcccaggctctggggcactgtggctgcaagagcacggctggcccaccctccaaatgtggccctgccaaggcatggggggccctgccccagccactggtgctcttcctggagcgggtggaggggccacccaggccagggaagggctgacagtgctcgtaagtgccatcgtgaaagtggaggctggaccggctagagctgctgtctcacactcgggtctccacgctctcaggtccaggaccccagagaaggccacacacagagcctctcctcagaaaaagtcaagccccatatgcttgcttgtgtttgttgttctttagagacagggtctcactctgttgcccaggctggagtgcagtggtgcaatcacagctcactgcagcctggacctcactgggctcaggtgatcgtcctgcctcagcctctcaagtagctgggaccacacttggctaacttttttttttttttaattttttgtagagacagagtctcgcaattttgcccaggctggtctcaaactcctggcctcaagctattctcctgccccagcctcccgaagtgctaggattacaggcatgtgccaccacacttggctttccatatgttataagtacattttccagggaattatgaccccctgaagcccaatcatgaaccccaggacaaaaatcccagccctggtcggacacagtggctcacacctgtaatcccagcactttgggaagcagaggcaagtggctcacttgaggccaggagttcgggactagcctgggcaacacagcgaaatcccatcaccacaaaacgcaaaaattagctgagcatgttggtgcacacctgtagtcccagctacttgggaggctgaggtgggaggatcgcttgagcccgggaggtcaaagttgtagtgagctgtgtcacgccactgcactccagcctgggtaacacagtgaaaccctgtctcaaaaaaaaaacaaaaaaacaaaccctaaccctatccaacgagaaggaacaggcagccacactgaacctcaaacaggatcaaaacgtttactgagaggttaatacggatttgctgaagaaagacgttgcaatccatgttgttaaaacgtgttagcacctatcagtttaaaaaacaagatgcgattttctctgaataggaaacatgtcggcctggtgcagctacccctccccccgcccccgcggctttttataagtggtttgtaagatcagccctgtggcctgtgtgaacagaagcacatcctccgctacggaaaacaaggctggggccccggcggctccgcgtggatgtgggtctgcttctggccttgcagacctgccatctcgtggtccaggggccccctcccaggactgttccttctctactgtcctccacctcgcaaaggcaaatgtgggggcatcagggaaggccagagcccagcactaagccccgctccatatccactccagcacacatcccaggcggcatccgagggcctggagtggcccttcgcccacagccggccaggcaaacacggggaggccagggccctgcacccctctagctctgcagcttgacctcagggagctcccacaggggtcgttaccccaaatgggtatccaccactgcactggaaaagcagcaaccaacagaacctgacctctggcgctcggttccgccccccagtgggtctccccataaagccccgccccccggtgggtctccccatgaagccccgccccccggtgggtctccccataaagccccgccccccggtgggtcgcaccatgaagccccgccccccggtgggtctcccatgaagccccgccccccggtgggtctccccatgaagccccgcccccggtgggtctccccatgaagccccgccccccggtgggtctcccatgaagccccgccccccggtgggtctcccggtggagctcggctcctgcaggtccgctccggaacctgctgactctcctgcgattcctaaactggcagcgatgctccagagcctcttccgccccgacagcagccccacctctgcccggagcccggggcgcctccactgcctctcctcacacagctgcccgccgcgagctccccctgcaccctgcgcctcggggtgggcgttccaggactccccgaacccttggggccgccccgctctgggctgcctgtgccccacccgcctcactggttgatctcacccacttgagatgccctcgccaggccttttttggcaaatctgcctccctgttcccaggctgcctttttctattatttcctccccaagcaaatccatccactccacacctgctacctgacaacgacctgccagtgctgagctccagggtgggcgcggtgggtgcagacaggtcggcaggcacaaggacagggttctccctcccgaggcagggcgggggcgggggggcgcagaggtggctgagggttgggggctccaagcagagcgagctgagtttgccgaggcctggctgccttggcggccagcaggtgagcagggtgggccgaagcctctgcaggggccatgtggcccagccacacccaggaggccggggcagagcagacaggggcccggggcggatctccctgccctgctgtcgtcccccctgtgcagagtggacccggtgtggggtccggggcggtctgcgccctcatcaggacccgcctgcccggacatcgtggccacgcgcagcgcgcggcacgcggaccctccccgcactcaccagcgtgtggcgcttcatgtgctcgcgccgcgtgaacttcttcccgcagatctcgcaggggtagggccgctctcccgtgtgcgagcgcatgtgtcgcttgaggatgcactggtgcatggccgagaagctgcagtacggacacttgaacttcttcctgatcaccgtgaactcattcactgaaagagagggacccgcgaggcgtcagcagggcttgggatgtaccgccctgcggcccacagaccacggctgcacgccgcagcccagcagccaggacgggctgtctcccacggccacccactgggggctggtcagcactgcgacaggccaggctcccccaccatctgcataaattgtcccacccactgtctggcaggggcggtgccagcaaggctgagccccagggagctcaggagccccagctctcaggagatctttccatccaggccaaaggcaggaggcaaggggtaagaacggccaatgctgaacacagtgcccggtccctgcaggaccctccttccagccctcagaccccactgggcatgtgtgggtagcaggccctgggcgtggtgtccgatcagacgcctccctggaggcagagaagaaacaaacactgtggagtaatacggacccaaaagtgtgcaggcgaaatgggagatgtgggtgcaactcaaagtcctgggctcttcttgctggacgccggagaagcagccagacccatttaatcaagttcttttcccccaaccctgagacccaacgtcactcagtggcaggaactccacaccaccatctccatggtgcgtgccctggggccaggctcaaaaacctgggggaccctcagcacgcccagtgccgttatgctactcaggcccagataccagcacgtcagacctgggcatgggccactgagagagcccggagcagccacgtccacgggaccctacgggagacccacctgaagcccggtgcacgcatgtgccgagggctgctcaccctgggattaccatgtacttgctgctgtgcaggacatcttcccctctgcatactgtgaccacctttcagtgctgggatttttaactacacagcttttggatgtctgaacacatcataattaattaaacaggcactactgctgaacacgtttctgtgttttcacccttgtggacccttcagtgaggctcctacagatgggtctttgcagccctctgccacctcctgaagataaattctgacaagtgggataagcacctgccctcctgaccagcagtccccacttgccctgcagggagggtctactgaggctctgggggctccagtggacaggcacacccccatgacaaggatctcccaaaaggcagctctaacaggaaactcagcatctgccaggagcgctcattttgtgagactggagcatgtctgtgtggccaagacacagaaaaccccggaggccccgcctggcacggcagcacctctgaccagctggctgtgttcggacgcatgtccccgccgcacatcccccgagtggctcctgacgaggaaatcccaagctcttcctggcctgtcctctgtcagccacactgtgcccctggctctcctccgtgagtcagtaacaagagacttctccttaccgccaccgtcccccaggccacccttctcaccctgacagcgcctggttctcgcattatcacacccaacagagcaaacgctccacacattctaggctagaaaaggagagcaaggaaatgagtttttctattagtttatttaaaacagcattttttttctctttttttaaacaagatgaggtctcgccatgttgcccaggctggtcttgaactcctgggctcaagcgatcctcccgccttggcctccaaaagtgatggggattataggtgtgagccactgtgcctggcccaaaacaactttttttttttttagacggagtctcactctgtcacccaggctggagtgcagtggctcgatctcagctcactgcaagctctgcctcccgggttcacatcattctcctgcctcagcctcccgagtagctgggactacaggcgcccgccaccacacccagctaattttttgtatttttagtagagacggggtttcaccgtgttagccaggatggtctcgatctcctgacctcgtgatccgcccgcctcggcctctcaaagttatgggattacaggcgtgagccaccgcgcctggccaaaactcttttgagaatatattcattcatggtttctactcttcctatataaacatgaaaattaaaattttgaattatatattttagccatttttatttaattcagacctacatgttaaatatttatctctgtatagaaaccctgtatttttttacctagaaaaacaacttagaatggacatgagcaggactcagcgttaataaccccgtgagaataaacgccacggacccagggcagagccgcagctgcggacggtcccctcaccacctgcatgtgctgaagctgcctgcgatgcacttcggcttcttcttaatgctctgttttccggtcactaccataacacagcaccacaaagcgtgaggctcagaacagcccggtccactctcttgcagttctggaggccaaaggtcagagatcaaggcatcagcacgggctggctctctccagtagctccggggagggtccctccggcctcttcagctcctagtagctccagctgccccttggcttgtgaccgcatcgctccagtctctgccaccatctgtgtggccttttctctgtctgtgtctcttcctcttctcttagaaggacacttgtgattggacttaggacccatctggacaatgcaggaggacctcattttgagatcctttatcacatctgcaagacctttttccaaagagtcacatccacaagctctgaggatcaggacggagtgttcactgctcaacccacgacatttgactgacagtactgtgatcattgagggaatttcactggctgtcattactaaaataatttcttactggaaacaacaccttccatgatttatttgtgatttacagtctatatatcttagaaaaaacttacatcacgtagcttcattctcataaacactgggaagcctttaaagtccatttggtaacaggaattaaataaaaaagcataaagatcattacacggaaacgggcactctcacgacctgtcctaaaaacggaaccctttgccaggaatcaggtgttctcgcaaggaaaaggccaacttccaaaagagtaactgagaagcgatgctatcagagctggcgtggaccccctaaaataggacattcagcgacatccggctgcgactgtacagaattgcccctgtgaaaacactgcagtcattcgtgccggactggaggcctcccctaagctcagggaagagcagaggtctctggcctccctgcaccaagccaagtcggctgcatggccacctgcccttggcccttcctctgtcccctcccagtgcgctttccgctccaggagaatcggacctgtcctaaatagccactgtaccagggaacattccagaaccttttcatgatagtgtcaaagactgcaagaaaccagccgtgaagcaaatggactggcagttggcttcagacgggcagacaggggacaaggcatcttcggagggttcaagtttgctgcttcctgagtcttcatcacaaaaccatctggatattgaattggtctggatataattttcaaaagactgcactttgagagcatctccgaaagggatccaaacatcaactgttctttgtttttttgtttacaaatgtattaggctgtcacttaactctgtgttagaatgtgatgaaattgtgatctgtccagattattttcaaaaacgttttaagccttatgtaaagtgcaaatacgtatacagctcaatgaactttatctacatacaccacacatcgccaaacaggcactgcgtgttcccagcaccctcgaacaagcctctggccctcccctagttgtaacccccagagagcaccctctgccctcaatcaccacacgttttattgccctagggcttcgtatacgtgggatcctaccctcgtgttgggctttcttcactagatgtggcccgcactgctgcctggaggaggatgtggttgtttgtggtgcgtggtactccatgacaccactaagccacatgtccatcctgtagataccagtttgggcctattgaacaatggagatctgatggctcttacatgtgtcttttggtgacttaagttctcattatttctgttgggcatgccctggcggggaaggggggcttctggaccacagggtgttcacctgcttggcttccgcagatattgccaattttccaaagatttatgattcctctcaaagtaatttttgtgcttggtcagaactaggggtcaagattccctatttttggggaggggaacagaatcttgctctgtcacccaggctggagtgcagtggtgcgatctcaactcactgcaacctccgcctctgggttcaagtgattctcctgcctcagcctctcgagtagctgggattacaggcactcatcgctacaccaggctgatttttgtattttcagtagagacgcggtttcgccatgttggccaggctggtctcgaactcctgacctcaggtgatccacccgcctcggcctcccaaagtgctgggattacaggtgtgagccatcgcgcctggccacgattcacttttttcctccatgtcaatgtccagtcactcagcaccatatcttgaaaagaccatctgtcccacattgagttgcagagtgggctttctggtgcctcacgggccctggcggcgtgtctaccctgcatcaccaccacagcgtctccacgacggcagcactagaagccttgatgtctgcatctgtcagtcctccagctttctccttcctttccaagatcaccttagccatgtgtaggaaccctggcttttatttccaggtttctgatgccctgacatctggggtctccatgaccctgcaggaacttcccctcccagttcctagagatagcagtcggaatcacctttgagtgcacctttcacaggtgaaccaacccatccagagctcacactccctccacccgccccgtccagggctcacactccctccacctgcccatccagggctcacactccctccacccgcccatccagagctcacactccctccacccgccccgtccagagctcacactccctccacccgccccgtccagagctcacactccctccacccgcccatccaaagctcacactccctccacctgcccatccagggctcacactccctccacccgcccatccagagctcacactccctccacccgcccatccagagctcacactccctccacctgcccatccagggctcacactccctccacccgccccatccagagctcacactccctccacccgccccgtccagagctcacactccccccacccgccccgtccagagctcacactccctcctcctgctccataggttctcacactacagccagtatcccctcccctaatcacccctgggccatacaactagacacagctcctatgcccagagcctgctgaaattattcaaatcacacaatcccaaaccagcttaccctgccttgcccgttcctccccacagaaaccaaacaaggctccggcctgcatttccccctctccctctgcctcctgactgaccctggtgcttccccatgtgtctctgcctgggctggtgggcctgctattctggaaattggtgagtgtaacaaacttcttccctttatgagttatttctgtgtctgtgtcctacgacaccagattaacacaaatccccaggtgcccttagatccctatcctagatcctttgcatctccaaatatatttagcagtcagtttactcacacacgcacgcgcacgggcactcacacacccctctgctgggatcttaaccagaattgtgctgacccaatatatcaacttaaggagagtcacatctttttttttttttttttgagacagagtcttgctgtcgcccaggctggagtgcagtggtgcgatctcagctcattgcaagctccgcctcccgggttcacgccattctcctgcctcagcctcccgagtagctgggactacaggcgcccgccaccacgcccggctaatttttttgaatttttaatagagacgggtttcactgtgttagccaggatggtctcaaatctcctgacctcgtgatccggccgcctcggcctcccaaagtgctgggatgacaggcgtgagccatggtgcccagcggagattcacatcttaacaatagtgagtcttctcctccatgaacatagtatctcccttcatttatcattatcttctttaatttctcccagcaatattttatagttttctgtgtagaggtctttgcatattttttgtttaatttattcctaggcatttgatgtcctataaaatgaaactctgttatttatagaaatacaattgacttttgtatattgagtttcgtacattggctgtatatccagtatatttaattatcctgttaaaaatctaagtttctagattcttttgaatgttctatatgcatagtcatgtcacctacaaatgatgcttttacttattcccttccattcatttctttttcttttttttctttagtaaagacagggtcttgccatgttgcccaggctggtcttgagctcctgagctcaagtgacccacccacctcagcctcccaaagtgctgagatcacaggcatgagccacagtgcctggcccctttcatttatcactgtattgcacagcttgggacaaggggtaggactcagggaggaggggggcaagggaggttcctgacatgacacaaacattaggaaggcaagagctctcaggggcagccctgcacacacaacccgggcaggatctccagccaactctgaatataagtggtgacgatgggcgtctgtgtatcgttcccgtgctcagaggctaagtcatcatgatttcacaattaaccaaaaggttaacttttttttttgtagatactttttgtcagatttagaacatttctttatactccaatttgccgattcttatcacgaaggctactgaattttatcaaaagtgtttcctgcatttattgaggtgatatagcgggttctctcctttattcggctaatgtggtaaattctacacattgattccaaacactcacttaaccttgagttcttggaatgagcctgcggaccatgcaacacggttcttcctctgtctcactggattcaatttgctggtatttactttaatagttgcacatctctgctgagtgataatttcctttcttgaaatgccacgtcaggctctgggatcaagaccatgccagcttagataggctggagactgttcctttcttctagtatttggaagatatgtctaacgttggcgtcattttcttccgttaaaattggaaagaattcactagtaaaggcactcgccctgaagctttctctgtgggaaggctttaaagttattaattcaattttctcagcagatcataaaaccattgagctcttcctgtttgctccagttttgataaattctgttttccaggaattttcccatttcctccaatgtgtcaaatatattcgcataaagttgtgtataataatcttatctatccaatatccgttgatcacttttcacaggagttatatcagtgtttttgttttttttttttgagacagagtctcactctgttgcccaggctggagtgcagtggcacaatctcgattcactgcaagctccgcctcctgggttctcctgcctcagcctcccgagtagctaggattacaggcgcctgtcaccacacctggctaattttttctatttttagtagagacagggtttcaccgtgttagccaggatggtctcggatctcctgacctcgtgatccgcctgcctcggcctctcaaagtgctgggattacaggcgtgagccaccgcgccaggccgagttatatcagttttattatcttttcaacacactggctttgggcattgttcactttcggttttggggtttgcccaggctggaatgcagcagtgcaatcatagctcactgtaaccttaaactccttggcctcaagcgagccttctgacttaacctcccgaagtgctgggattacaggtgtgcaccaccatgccagctacactgttgatttttgtatgcctgctttctacttcattgatagctctttttttttttttttttcagatggagtctcgttctgacatccaagctggtgtgtggtgccatgatctcggctcgctgcaacctccgcctcccaggttcaagcaattctcctgcctcagcctcccgagtagctgggattacaggcacccaccaccatacccggctaatttttgtatttttagtagagacagggtttcaccatgttgaccagactggtctcgaactcctgacctcaagtgattgacgcacttcagcctcccaaagtgctgggattacaggcatgagccaccacactcaccctgatatctattctttatttcccttctgttactttctttgggcttaatttgctatgctttttcttcttgacaaagaaatttagaacctttcttctgtcctaatatataactagagctgtaagtttcccttaaatattgctttagatgtgggcctaaaagttttgatacagcattttttcattatcattcagttaaaaatattttggccaggcacggtggctcacacctgtaatcccagcagtttgggagtccgaggcaggtggatcacaaggtcaggagttcgagaccagcctggccaatatagtggaactctgtctctactaaaaatacaaaaattatccaggcgtggtggccggtgcctgtaatcccagctactcgggaggctgcagcaggagaatcacttgaaccccggaggcagaggttgcagtgagcagacatcgcaccactgcactccagcctgggtgacagagcgagactctgcctcaaaaaaaaaaaaaaaagtttatcatttccatagggatttattctttgacttgagggttgtgtaaacgtatactatttgatttgcaagcatttggggatattctagtgtcttcttgttactgatttctaattccagtttgctaaggtcagagaatatactctctgatttcaatcctttgatatttgttgaacctgaattatggccctggttggtctattttggtaaatgtttcctgtccatttggaatatcctgcacttttggtgtaacgttcaaactgggctaattgtgctgttacagccagtatctctatgaacacagatgcaagactcaaaccaaacattagctaactgaatccaataatacagaaaaagaatagcagcttgtgaccagatgtgtttatttccaggaattcaaggtgaatttaacatttgaaaactgtgttcaaatattctctatccttactgagattttgtttgctgttctatcaattactgagataagtgttttaaaacccccaattgtaattgtgaagttatctctttttttagttctgccagcttttacctcatgtattttaaaactgagctgttgccgggcacagtagctcacacctgtaatcccagcactttgggaggccgaggtgggtggatcacgaggtcaggagatcgagaccatcttggccaacatggtgaaatcctgtctctactaaaaatacacaaaaaatgagccagggtggtggcacgcgcctgtactgccagctacttgggaggctgaggcaggataattgcttgaacctgggagacagaggttgcagtgagccgagatcgcgccactgcactccagcctgggcaacagtgagacttctctcaaaaaacaaacaaacaaacaaacaaacaaaaaaaaaaccaactgagctgttaggagcaatatgcattaggattgttatatttactactgaattgactaattatcattatgccagtccctcttgagtaatacttctcaaagtttactttgatattaagattgctatactgactttctttttggttagtgtttgcttgattcatctttttcttttctttttttcttttgtagagatagggtgttgctccgttacccacgctggagtacagtggcacaatcatagcacatggtaacctcaaacttttgggctcaagtcatctcctgcctcagcctcccaagtagcttgaatcactggtgagcaccaccaaacccagctaattatttaattcttttagagatggggtcttgctaagttgcccaggcaggtctcaaactcttggccccaagtgatcctcccaccttagcctcccaaattgctgggattacaggtgtgagccactgtacccagccaataaatagtttttaaaaacaggctatgtgttttgttcatttttaataatgtaattattgatgtggctggtgtaaggctatcatcttgttttttatttgtcctttatgctttttgttcttattcctcctttcttgccttctttcaaattaatcacgtattgtatcgggccattcttgcactgctataaagaaatacctgcaactggataatttatgagaaaagaggtttgattggctcacggttctgcaggctctacaggaagcatggtggcatcagcttctggggagaccttagggagcttccaatcatggcagaagtcgaagagggagcgagcgtttcacaggacaggagcaggagcaagacggagggtcatgggggaggtgccacacgcttttaatcgaccggatcttgtgagacctcactatcatgaggacagcactaaggggagggagctaaatcatccatggaaggtcccaccaggcaccacgtccagtattgcggatcacagttcaacatgagatttgggtggggacagagatccaaactgtatcaagaattattccatttcttctcctcattgagcctttgaatcacaccacttttcctattttcagtcatcattcctgtgactataaagagtcagaaccacacgacagttaactctcatccaccccacatgctaatagtgtcatatgttttgcttctatttaggtttaaaaatcccccaaattataattgttgctttaaacaatcaagattattttctattactcacacagttgccttatctggtgctttcttttttctttttcttttttttttaaataagagacggccttgctctgtcatccaggctggagtgcagcagtgcagccacaactcacaccagcctcgacctcctgggctcaagcgatcctcccacctcagcctcccaagtggctggaactacaggcatgagccattacacccagctaattaaaaaaaaaaatttataggccaagcacggtggctcatgcctgtgatcccagcactttgtgaggccaagatgggtggatcacttgaggccaggggttccagaccagcctggccaacatggtgaaaccgtctctactaaaaatacaaaaaatcagctgggcatggtggctcacgcctgtaatcccagctactggggaggctgaggcaggagaatcacttgaactcgggaggcagaggttgcagtgagcagagatcgcaccattgcactccagcctaggtgactgagcgaggccctgtctcaaaaaaaaaaaaaattgtgatgaatatttttgttgggtatagagttccaggttggcatcttttgctttccagtacttcaaagacgtcattcattgtcttctagcttctgtagtttctgggaaagtcagccatcactgttgttcttctgaatgttaagcattttttctctgttttttttttttttgagacggagtttcgctcttgttgcccatgctggagtgcaatggctcgatctcagctcaccgcatcctccacctcccaggttcaaacagttctcctgcctcagcctcccgagtagctgggattacaggtgtgtgccaccacacccggctaattttgtatttttagtagagatggggtttctccatgttgaggctggtctcgaactcctgacctcaggtgatctgcccacctcggcctcccatagtgctgggattacaggtgtgagccactgcacctggccctctggctgcttttaagatttttttttgtttttcttttgagacggagtcttgctctctcacccaggctggagtgcaatggcgcggtctcggctcactgcaacctccacctcccaggttcaagtgattcttgtgtgtgtgtgcgtgcgtgtgtgtgtatgtttgtatgtgcatgtgtgcgtgtgcatgtgtgcatgtgtatgtgtggttgtgtgtgtgtgtgcgtgtgtgtgtgtgtggggcttagaggcttggggtggggggcagttgtatgcagaagctggggtcctcctctttgtttcttgcttcttgggattttgcccctcaagtcccggctcctctggctgccccgaaggacaatctctatctgtacactgccgtccgctcagggtccacttcctgctccagggtttgggaaatatgccagcaacaccactggggtgaagggcagctcatctgtgttctctcttctctcaaggatcacagcgttgtcccacctgcactggcccccttcccgggtaggttatgtgtgggcgtttcttttcttttttgatacagggtctcactctgtggcccagctggagtgcagtggtgtaatcatggctcactgcagcctcgacctgctgtgcccaagcgatcctccctcctcggcctgccgagtacctgggaccacacgtgcacagcaccacgctcagctaattttaaactttttctgtagagacaaggtctccctatgttgcccaggctggtcttgaactctcaggcttaagcaatcctcccgccacaacctcccaaagtactgggattacaggcatgagccattgcacccacttcatatgctgaatgaatgtctgtgtagtttcaggggaaagaatgttagaagtagggataaagtcatactgctatctattctaaaaatgttcttagagcccttatcattttactatctgccacgagcatatttttttaggttctatggcacatgtctacaatttttaaattgttttcaaaaagttaaccaaactctttcagcaaaatggtacggagagaatctctacaaccaggcctccttatcaacccccaagacaactctctccccgctgggcccacctgctgcccaccctggagagcaaaaggcaaagctgtcatgcggcctctgatgtacctgcttcaacagcactagggtgtgccctgcccatgaacgcagagcccaggcgtggactaatctcacagtcagatgccacaagtttcttctgtcatggtgcccaggttgagacatatcatctcaggcccaacagctgagagatcctttttttttttttttttttttttttttgagagggagtttcgctctcgttgcccaggctggagtgcaatggcatgatctctgctcactgcaacttccgcctcccgggttcaagtgattctcctgcctcagcctctcaaatagctgggattacaggcgcccgccaccacgcccagctaatttttctatttttagtagagatacgatttcgccatgttggccaggctggtctaaaactcccgacctcaggtgatccgcccaccttggcctcccaaagtgctgggatcacaggcatgagccactgcacctggccaagagatcccattttgaccaaaaaaaaaaaaaaagcttcattttctctacaactgatattaaaactccaacaggcatttgcataaagaggcgtctggcagctcagaaggcacggcctgtgtggactgctctcccgaccctcacagatgccagcagagcgcggtcacctttggtaaaatgccccaaacctcactagaaatcccacttttctccatcttcagaaactcatctcaggaacataaaggaacataaagatttgaggaaccaggggaggctccagcagatggttccagctgcagtggagatggggaccgtccggaaaggggatgggctgttgggcagatggtgggacgcgtctctggcctgggagcgggctcccccgacacgccaccttccctgccagatggtgcttctgggtattccagaatctggaatgggggatgcctatccccctcctgagcccacctgctgctctgggtccctggagcccaccaagtccacaaccacctgctctgaatagaaagctgacattgaacctaacacgtccgacgaggacgggcaagggcaccgcggggcgctctttctgaaaagcagcacattcccgtaattccacgccgacacgtggagcgccgcgcacatgccaggcacacaccgccaaggacgccgtggcaggctttgtctttcgatctccctagaaagttgctgggtcggagccacgtggctccacttcccacggatggggacatgttttcccgcccctgaaagccccccgtccccacacattggcaatcccgtaggatctcggtcatctgaaccccgtcgggcagaagctggaggtccacccgccccagctgcccaccggctgggcatggagatgccttcacctggcagcagccggcagaggactcgagaaatgaccacagaaaggcacacaccggctcccagtcacagctctccgcagatatccccctccgacgcggctgttcggtcacccagttcccctcctgctcccacacacttgagagctctctcgcctgggcagctgcacccagctggagcccgggacccggacgccaaagctctggccgcagcactgaggtcaaagcaaacgccggctccagcgcacagaccagaggcacccgcagttctgtcccaaaccacttccagcaggggaggtgccttcgctgctgtcacttgcttcacagagctccttagctggcctcagggtaaagctgtcagcgcccaaggagctccaggcgaggccaagccgtcctggcactggctgcccccagggctgggcaagtccatccagggctgggcaagtccatccaggcctgggctggaagaagactcctcaggcatcctggacaggccacaggccctgcagaaacccaccctcatgccagcgggagccaactctggaagaggactgctccgcccagctctccacgccatgagaggtgtcgatctggaaccagagacagacaagttacagaccgtcaggatgggataaaagcagcaagacttctagtgtggacactctgctgccctcactcacctgggatgttgtccaatcactactaagacagcctgtcaacagccatctggaaaggaagactgtaattaattctcaataaagagacactcaaaaatatatgcattaacaaaacattaacacctgccaccaaaactatcctgtgagaaatgagaaacgactcgtgtgggaatagcaattaatttcaaaatccaaaatgtgtggttaaggctgggcaccgaggctcatcctagcactttgggagaccaaggaggctcatgcctgtgatcccagcactttgggaggccgaggcaggcggatcacctgaggtcaggagttcaagaccagcctggccaacatggtgaaacctcatctctactaaaaacacaaaaattagccaggcgtggtggtgtgcccaacgggataccctaacctgtaatcccagctacttgggaggctgaggcaggagaatctcttgaaccccgaaggtggaggttgcagtgagctaagatcgcaccactgcactccagcctgggtgacaaagccagactctgtctcaaaagaaaaaaaaaaaaagtggttgagctcttgttaaagaatttttttttctccagggaggtacacaccccatggccctttctttatagaaaagactccgcgacttcaggcacaggaaggagaatgccttccaccagggctctgcgcggctcgggctggggcagtggaacggcttccaccagggctctgtgaggctcggactggggcagtggcctccgagtcgggggttggccagaaatgtgcagtgaccaggcctggaagggaccggccaccaccactgagctctaggaactgatgtttccaacccactgcaacatgaattgaatgtctttacattaagggaaaaaaattgctcaaaatataaaaaccaattcaacttcatacaacctgttgctgtgggagtggaacaattactattgcaaaagcgaataactcggctgacctaaaatgggttttctctgtacctggctgagttgagggtgggagaggagggcacatggagagcaggtgccaccaaagtgcctcctcggaggtgcccgggctcatctgggccgtggccacgcacacatgggtgtcagggacaccatgccccaagtgtttggcccagttgccccagacaaagctggccaccctggtgtcttacctgagctgggggaggctgtgccggctccctgggctgggtctggcggttccccagagctcatcctgtggctctgagggtggagggtggaggggcttctgttctgccatcagcgaccctcacaagggacccaggccctgggaacacaggaaaggaggagtctcacccacaggaacgcgcaccagctgctgggttctagagagttccagaagcactgacgatcttcccggcatgcggtgtgagcccggtgatgccccaagggtctcgctggaggcaggtgtttgaacgctttgatcagctggccaaccccaaatgcccgaggtctccacccatgacttctctgcggtgtgtctctttcctaggagccaagtgattccaacagagggttttggtggaggaagtcggagcgtgaacacctctggactgcagaaatgctctcctgatgagaacgccaaggcacgctggcctggaccacctgaaagtgcagcaccatgtccaccaaatgccctttagtcggcaactgttcacaattccagtctcgatccagaatcaagttaaagttctcgattcatcctttaaataccacagggaaacagtctttaaaccacaaccaaaacaaagacaagctgcaactgttctctgcaaaacgcctcctgacgcccgggcccagccgctccgccatctccacggccaccttctccagtaacgagctggtcagaagccgtccccgcaggaaaggactgcagggagctggggtgagcttcacgggaggcggcaccgcaccgccatggctgtccctagaatccttgactctttaaaagagtgaggggggttacaccagcaacgctccagaggccgcgtcccacatttccgggcacggctgatgcggggcttacagtctcctgtccccggccgaccggccggcggcgcatcctcggcttgtcagtgtgaagttggcttcctcgtgctgtttggagacacgaaggcagcacacacctcaaggccccaggagatcagcgccagcccagcacaacttgtgggcagccatgttctgagcctaaatgacagttttcatggtttctactgggagaacaatgtctagtaacagagaggaggcccgcctactgctgaaaaaggaataaaagtaagcacgaagttcaacagaattgaatgagaagtatggcaagtcctctgacagggatgtcagagattgatggtctagtaatgaaactgccatctgtttaatttaacagccaagccaaggttactggtcctacaaatccaaggaaactagttcagtttttctagaatgttccagaacccatccccaaaggccctctgagtgtcggctgctctgtgctgctggcctgctgcctgcatatttaatggttctctaaattcagaaatctgcgaccaccatcccatttttgtgcagaattgccacggccggacgctgtttgttgaaccacggcgcattcatgacgaggagaactgggcaggcggtgggatccccacccggcaccccgtaccgcaaaggggcagtggacacacagtgaggaccgccgtgtccccatttcctgcacgatgcgccagcccacggggaggtacactcgacaggacaccctagagaccacgctaacaagaggcccagccctggaaatgctcatcgcctgcaaccagcacatggagatggtcgcaagtcagcaccggccacgcccggcacagcagccacgccgctcgaaccacagcaggggccacgtcagcaggaggtcgcaagtcagcaccggccacgcccggcacagcagccacgccgctcgaaccacagcaggggctactcgccctcccaggccctcttcagagctggcctgagttgaagctgcgttcctcctgctctgagggctgggtaccggggaccctcgcccagccgaggccgctcttgtcttcttctctcttccgacagggagcggaggagagaggagccggcggcccccggggctcaggggcgcatttccagagctgcaagatggcgggggggctacgccacaagctgcaatgagctgcccccactctccggcccccacagtcacccccacattcagcaatgggaggacacggctctgcgtccatgaccctccagaaggaggggagggagagaggggggccacgcggtcccgccgggcctggcgctcccgcacggtgttgagagacttagaagtccgtgagttcaacgcttcagatcagcagacggcgtcagaccccggggctcagttctctcccccgatcagcgtccacctgggtaccggcgagtggggctacgccgtgaactctgaggcgctcctccaccgcggcagccccccgagaggccaggcccccggaccccaccttcagatcacaccgaggcgcctcggctaaggcttccctggacgcaggcgctggtgtccacggtttactcccgcgcggattccacgggaccacctgtcggggacagaaggcctacggcagtgagggaggaccacagaactttggaaaatccaagttttttctgagtatttccattatttacctcagtgcatgccggaaacaggcaggggccacacaggatgccagaaaattacgttttaaaataacctgtcccccgccgagttctacagccactctgctgggcaggcgtctggggcatccagttcacagcccgacaggcgaaggatgctgacaacttctaaaccgtgtttacagaaaacaaaagggcaaattcttttttttttttttttctgacgagtttcggtcttgttgcccaggttggaatggcatgatctcggctcacggcaacctcctccttccaggttcaagcgattctcctgcctcagtctcccaagtagctgagattacaggtgcccgccaccacacccgggtaattttttgtatttttagtagagacagggtttcgccatgttggccaggctggtcttgaactactgacctcaggtgatccacctgccttggcctcccaaagtgctgagattacaggtgtgaaccatcatgcctggcccaaaagggcaaattcttacaagagaaatagaaaatttagaatattaaaaatgaggttagaacttaagagaaataacaaaagacccaccagccaacttcacctggaattagtcacagatgaactaaaaactgagtgagatggggccaggcgggatggctcacgcctataaacccggcactttgggaggctgaggcaggcagatcgcctgagctcaggagttcgagaccagcctggccaacatggtgaaaccctgtctctactaaaaatataaaaattagtggggtgtgggggcacccatctgtagtcccagctacttgggaggctgaggcaggagaattgctggagcccgggaggcagaggctgcagcgagctgagatagtgccaatgcactccagcctgggcaagagagcgagaccctgtctcaaaaacacacacacacacacacacacacacacacacacacacacacacagaagtgcggggtgtgccctcaccccaccttcaggatttaggacacactcaggatgcagaggacacagcactctcactgcagggagaggccctgggaaaaagccagaaccactcaaggtcccagcctcaggctccgcggccactccctccacgtgctccggggctcgcttccggaaaggaggggcccagaacagaaaagccccgaggaaggggagaaactgccagggccaccaaggccgagctggggtatgtgttccccaaggtcagacctggcaccacagggcccacagctcgtatgccacgggtgaaatcgacatcttctgccaagccgtgccctccgaccccatctgctgcacacacaaaccagcaaaggcttcatggacggagccacacccagggagggctgtcagacgcagaaacagtagaaaaagcacaaacaaattgtttcccctcagtccaatggcttttttttttttttttgagacagtgtctcactctgtcacccaggctggagggcaatgatgcaatcatggctcactgcagcctcaacctcctgggctcaagcgatcctcccacctcagccgcctgagtagctgggactacgggcacaaggcaccatcatgctgggctaacttcttgtagggatggggtttccccacgttgcccaggctcccaaagtcgttcttaatgaccaagacacaccagctgtacctggggtgctgcaaaggaactgggtgtgttggggtccctgccctgaatgagtgtatacgacggtctgagagatccacaggaaacagcacccaagcccctcatgtgaaaaggcgctcggaggggagggtagtgagggaggcctgggatccccctccgacggcacccacgggcatgtgccaccggccgcacccaagctgctcatgtgaaaaggcggtcggaggggagggtagtgagggaggcccgggatccccctccgaccgcacccacgggcatgcgccgctggccgcacccagcctgtccctcctgacgcccacgaaacgtgcccagcgctccatctgaccggctggccgactgcaggatgcccacatgccctgccaccgcctcctggaaaggccccagtaccccggggtttgctcaaatccaaccatttctgctgacaagtacacttttgcatttgagaggggacggggccaacatcttggagcataaatcacaaacactctgcctgcaccgtgtttgatattttagaaacgctattttgtttgaattcacaacagctgtgtaagtggcaccccccgcccccccccccccccccagtttttcagatgtgggaagtgaggcctcaggatgtctgtgacagcccagcacccacagcttgtcccgtctgtgcagtgctcagccctgagcctcactttcagggccaagacccttcgacggacacggctcctcactgagtacacggaataaagggaaggtgaacaccactttccacatgtagtctttattacccacaaacagttggcatcagtgctcacaccaacgcgaaaattcgaaagaatattttagtgcttatgaaaacaaagttgtaaaaatattgttttttagagcagcgtaaagaaacagagaaacagatatacttcccaaatcccagcatcaaggacagctggcacgtttccttccttcacttccctcaatactcagcaaacaatgtgtccacaccactcagcacgcctggaccccagccgcggaggtgggggcatctcatgccggactcgctccctcctcccctggagagaaacgggaggcgcctcactcactctcagccgcatgctgagtgccagctatgtgctaggtgccagcaccaggccttgcccgggggcccacatgagcgcgagaccagaaggcagctggctgggggctggctgcggtgggttttttttgtttttttttttgtttttttttttgagacagagtctccctctgtcgccccggctggagtgcagtggcgcgatctcggctcactgcaagctctgcctgccgggttcacgccattctcctgcctcagtctcccgagtagctgggactacaggcgcccgccaccacgcccggctaattttttgtatttttagtagagacggggtttcaccgtgttggccaagatggtctcgatctcctgacctcgtggtctgcccgcctcagcctcccaaagtgctgggattgcaggcgtgagccaccgcgcccggcccctttgtttttttaaactccgaaagctgaatgcccccgtcttgtcaggaagtcagtcagtctggggtgagcccgacacgcagcagtggctgaacttttggccacatctcggcaggcgcgtcgtcgtttggattcagctggggacatttacgttttaaagacaacctccgacgcatctttaaaagtcacacgccaccagcatcatccagcgaaggcaacgcaaggcgaggcccccaagtgcaatcggctcgcagcggccgcccccatctcccttgcgcgaaacgagcctcagcacgaaggcgacagaggggccggcagggggcgcccgagcccgtctctggagcacaaagacccccggcccctgcgcgacccggacgagctcgcattcagccaacgactcctgtgagaaacattccagcaagcactcggctgctcccctgcccgccgcgctcacaaccgcgtccattccctcctcactctaaagccagccccccgtgcacctgagaggccagtccaggctgtgacgccgcatcctcacctcccgcaacagggaggtcagcaggcggccgagcagcagggacagaccctcagcctcatctcatcttggcccgggacctgcaaccctcagccttcaaaaccacaccaaagccaagcggcccccagggcctgcacttacgggacagcgagtgggcccctctgggcaggtactcgaacagcagggagccgtcatcccccagcacgtcggccttcagcgacagcaggctgttcttactcatgagcgccgcgcgcaggttggccaccgcggtggcctgatgcagggcgtcgtccttctctggggtgaggggagggcccagatagctggcttctcctcccaggagaccctcctccacctgtgcatagagctcggccctctctcctcggctgtcggagctgctggcttcggtgacggacaggtccgcatctggggacagagggacacacgtcagaagacacgggtcgttcccagactctccaagtgggacaggcgacacatttagaaggacagcgaccagcttctgcctgagctacagagcagcatcaagtccagcccaccctgggagccgggcacctgccccagcaatgcagcagcctcggcccagcccggcctttcctgcccacccaggtcccatggctgcggtggagtctcagccaaggctttggaggacggctcaactcagaacaacggggttgccctccctggacgaggcgctgcagacctggtacctgctctgctccagggccgagggcctgagagtcagaggctcctggggcggcagtatttccatctcgcaaagacgaggagaggctcaaaatggatcaatgacgttagagctaaatctataaaattcttagaagaaaatccgcatgatctcagatttggcaataggttcttagatacaaaaccaagcacaagcaacaaaataaattggactcatcaaaattaaatgtctgtgcttcaaaggatactaccaagaaagtgacgccgggtgcggtggctcaagcctgtgatcccagcactctgggaggccgaggcgggcggatcatctgaggtcaggagttcaaggccagcctggccaacatggtgaaaccccatctctactaaaaatacaaaaattagccgggcgtggtggcacgtgcctgtaatcccagctactcagtaggctgcggcaggagaatcgcttgaacccaggaggtggaggttgcaatgagccgagatcacaccactgcactctagcctgggcgacagaacaacgctctgtctcaaaaaaaaaaaaaaattgcaacctatatatctgataataaaaaggcaaatactgtaactcaatataaaaatgggcaaaaaatcttactagacatttgtccaaagaagatgtataaatggccaagacgcacaggaagagatgctcagcatcacccatcactaaggaaacgcaaaacacaacacgattccaccacacaatacggttccagcacacgccacggttccaccacacgccacggttccaccacacgccacggttccagcacacgccacggttccaccacacgccacggttccagcacacgccacggttccaccacacgccacggttccagcacacgccacggttccagcacacacccactgggatggctggatataaaaaggccaggcaccgtggctcacgcttccagtcccaacattttgggaggctaagaccggaagatctattgagaacaggagttcaagaccagcctgggcaacacagcaggacaaaaagttaaaataaaacaaaattagctgagtgtggtgggttgtgcctgtggtcctagctactcaggaggctgcggcgggaggatcacttgagcctgagaggttgaggctgtggtgagctgtgatcgagccactgtactccagtctgggtgacagagtgagaccctatctcaaaaacaacaacaaaaaagatcagataatattggcaaggatgggaagaaatcagaaccctggaaccttgctggtaagagtgtaacatggtgccctcctgcggagcaggtcggcaggtcctcacaacatcaggtacaggaatcaccacggggcccagcagttccacatgtacgcatgcagatacccacgagaaatgaagacacaaaagctcacagaaaacctcgtccaggacgcgcgtagcacgttatccataacagccaaaaggtggaacagccaacaagtccatcgatggacgaatggataaacataacaggtccatccccacaatggaatattatgtggccatgaaaaggcatgaagaacagacacaggccaccacacagaggagccgtgaaaacatgctcagcggacgaagccagacacagaaccacgcagaggagccttgaaaactgctgagtgaacaaagccagacacagaaggccacatgccatttcatttccattaaatatccagaacaggcaaatcaagacagaaagtaggtttgtggctgcaaaaaggggctggggaggggtctcggatgagggctaagtggtgcagggtttccctctgagccgaggaaaatgttctaaggggactgtgctgatggctacaggatgctgtgaatataccataccaaaaacctctgaactgcagactttaaatgggtgagtggggtgtgaatcatctctcagtaaagcttctatttaacaacaacaacaaaaacaacaaaaggtgacgacttgagtcatgaattcaacggattcctccgagtgtcagctcaggccagccagggctttgtggagtaccctccctctagtggggctgtatgcacgatatcaaaacacccccagaacacgctgagcgatgatgatttgcagatattttcccacagcaagagaatggattttccaccgtggtcgttgacaggaatcgggatcagaaccacagaaacacaggggcatggggcagggggcacttggagcaggggcagaggtgacgtctgcaaacacccctggaacaaacatgcacacgtgaggcccagcagctgagagctgggtgtggcaggtgggcagggcccccgtcaggcagcacacggggtgagtccagcctggcaggagcgggtgggagtctccagggacagtgacattcggaccgtcgagctacctatgacttcttctggaggcctctaagggatatgtttccaaactctactctttttccaaactatactcctttttatatttttttacaaatccctcgatgacacatcatattaattgtgcatttctaggaactaaatatacaggttatatccaaacttatgttaaggctttgtcttagcttgggatgccatgacaaaataccacaggcagggcggcttaacaacgaaaattagtttcctcacgctctggagactgggaagtccaaggtcaaggtgccagcagatctgctgtctggtgaggcccctcctgacctgcagatggcggcaggtgagccctgggggcccctcctcagagtctgggagcagagtgggtggtgggtgctgtgtgctcacgagcgtgttcagggatcagggccccgcctgtgacttcactttatcacttccttcaaggccctccccagacgcagccacacgggggctggggtttcaacacatgagtgtgggggtgcacattcagctcataacaggcttcaaaaaaaatcacccaattttattttatttaattaattaattaatttatttatttattttgagacggagtttcgctcttgttgcccaggctggagtgcaatggcatgatctcagctcaccgcaacctccgcctcccggcttcaagtgattctcctgcctcagcctcctgagtagctgggattacaggtgcgtgccaccacgccggctaatttttttttttttttttttttttttttttttgagacggagtcttgctctgtcacccaggctggagtgcagtggcatgatcttggctcactgcaagctccgcctcccaggttcacgccattctcctgcctcagcctcctgagtagctgggactacagggcgcctgccaccacacctggctaattttttgtatttttagtagagacggggtttcaccgtgttagccaagatggtctcgatctcttgacctcgtgattcgcccccctcagcctccgagagtgctgggattacaggcctgtgagccaccgcgcccggccgctaatttttgtatttttagtagagacggggtttcaccacattggtcaggctggtctcaaactcccaacctcaggtgatctgcccacctcagactcccaaagtgctgggattacaagcatgagccaccatgcctggccaaaatcacccaattttaaagccaaattttaaatctaaattattgtaacaaatcaaggtgaaaaacacataaaagaaatcaggataagctgaaagaactctcccttgtgtgaaatgctaaaatttgggtttccgccaggcacagtgtctcatgcctgtaatcccagcattttgggaggccgagatgggtggatcatgaagtcaggagtttgagactagcctggccagcccggtgaaaccccgtctctactaaaatacaaaacattagctaggcatggcggtgcgtgcttgtaatctcagctactcggcaagctgaggcaggaaaatcgcttgaaccagggagacagaggttgcggtgagccgagatcacaccattgcactccagcctgggcaacaagagtgaaactccatctcaaaaaaaaaaaagacagataaaagaaattctcattaattttatgtatatagtagttagcaaggtaactcaatggataaaagacaggtttcttagcaagcagcactggaacaaccttataatcctatgtaaaaagtgaacctcaagctgatctcacgccacatacaaaaaaaccaacttgaatcatggagctatgcgttatacttaaattgataaaaactcaagaaaaaccataggagaaagtctttgttggctgggcacggtggctcatgcctgtaatcccagcactctcggaggctgaggcgggcggatcacgaggtcaggagttcaagaccatcctggctaacatggtgaaaccccgtctctactaaaaatacaaaaaatgagccgggcgtggtggcgggcgcctgtagtcccagctactcgggaggctgaggcaggagaatggtgtgaacccaggaggcagagcttgcagtgagccgagattgcaccactgcactccagcctgggcgacagaatgatactccgtctcaaaaaaaaaggatcctcctgaagagacactgttaaatgaaaaaaggaggccatgcacagtggctcacgcctgtaatcccaacattttgggaggccaaggcgggtggatcatgaggtcaggagttcaagaccagcctgaccaacatggtgaaaccccatctctactaaaaaaaaaaaaaaaaatacaaaaattagctgggcgcggtggcgggtgcctgtaatcccagctattcaggaggctgaggcaagagaatggcgtgaacccaggaggcagagtttgcagtgagccaagatggtgccactgcactccagcctgggtggcagagcaagactctgcctcaaaaaaaaaaaaaaaaaaaaaaagaaagaaaaaaggagccaaaggccaagagaaaatattttcaaagcacatacttgatgaaggacttggaacgagaacacctaggaactctcaccactcagtaataaaagatgggcagaagatctgaacagacacttccccaaggaagagacccagatgtggagcaggtgcccgatgctcatcaccgccagctgagccacgacactcactcggccagagcctcacggtcaccacgtagacagcccaatcgaaacacggcaaaaagacctggacagacactttaccaaaaaagatatatgaatggcatcatccgccatcaaagaaatgcaaatcaaagaccatagagaagccaggtgtggcgtctcacgtctgtcatgccagcactgtaggaggccgaggcaggcggatcacctgaggtcaggagttcgagaccagcctggccaacacggccaaaccccgtctctactaaaaatacaaaaaatcagccaggggtggtgctgggtgattgtaatcccaggtactcgggaggctgaggcaggagaattgcttgaacctaggaggcagaggttgtagtgagccaagatcgtgccattgcactccagcctggacaacagagcgagactctgtcaaaaaaaaaatagaggccgggcgcggtggctcacgcctgtaatcccagcactttaggaggctgaggtgggcagatcacaaggtcaggagatcgagaccatcctgactaacacggtgaaacctcgtctctactaaaaatacaaaaaaaattagccaggcgtggtggtgggtgcctgtagtctcagctactcaggaggctgaggcaggagaatggcatgaaccggggaggcggagcttgcagtgagccgagatggcgccactgcactcaggcctgggtgaaagagcaagactccgtctcaaaaaaaaaaaaaagaaaagaggcgtggcgattttcaccaaaatccccggctactgtatgcaaacccccagtggtgagccaatgactcctgcagagacgcccaggctgcaacccccgagccgtggttttgccaccttgtggcagaacgactccgcagacctgattcggttcaggatctcacgatgagtcctggatgagccacgtgggccctaaacggacccaccagggccccgtcagcagagaaggaggcaggagggtgacagaagcgaggatgggaaggggcaggaatgatgtcgggccacgagccaaggatgctatggcttccagaagccagaagaggcacatggactcccctggagctccaggggatgcagccctgccggctgcttcagacttcagagaaccgtgagacaaaacgtgcattgctctgacaataagtctggtcatttattacagcagccatcaggagccaggtgcttgccaaaagcacaaaagccacaaaagacacctgcaggagagcctcacagccctgagcctgacacccaaacgcccacatccagacaaccacagaacaggctgcagccacgccccatgccccacgacccacgccccacacccacaggtgaggagcagtgttgctgctggctgcggccgtgagtccctcccacaccaggacaaggagcaaagccagagatgcaaggacaccctgccgagtggctgcgttaaaagttcagttggccaggcagtggctcacacctgtgatcccagcaccatgggaggcccaggcgggaggatcgctaagcccaggagtttgagactggcctgggcaacatagtgagatcccgtctcccgtcatagtgagatctacatctctataaaaaacatttttaaaaattagccaggcgtggtggcgcacgcccatagtcccagctactcaggaggctgaggtgggaggatcacctgagcccaggaggttgaggctgccgtgagccgagattgtaccactgcactccagcctgggcaagagagtgagaccttgtcttaaaaaaaacaaaaaacacagctgggcgtggtggttcatgcctgtaatcccagcactttgggaggctgaggtgggtggatcacaagttcaagagattgagaccagcctggccaacatggcaaaaccccgtctctactaaaaatacaaaatatcagctgggcgtggtggcacgtgcctgtagtcccagctactcgggaggctgaggcaggagaatcacttgaacccgagaggcagagattgcagtgagccgagatcgcgccattgcactccagcctggcgaccgagcgagactccgtctcaaaacaaaaacaaaaacaaaaaatactctgtccagtgccgagtgcagaatttttttaaaaataaaacaaaaacaaaaaacagcacgttcctgtgaagggtgttattgtctctgtccccgtcaccagctgctccccaacagactgtaatgtgatcaaagctgattgcaggtaattctgttcatacctgaaagcaaaaacatctagagaaggcgcagctgagttctcaagcttcccaggacaggactgaacaggggagtggattaaaagaggccaagccaagcatctcccgagcagctgtgggatcggggtgcggagccggacgcccttcccaccccactactgaccaaagcacatgatgtcatcttttggttgaaacccttccacccaaaaaataaaaagaccatcccaagtgcaggaaattttcttcaacagaacaatcagatctgccgtgctgctgaaacaggctgtgaaaggtgttcaggaggcgaaacattgttcaggaggccaggtgggggaacctcacattccgtcgggcaccaggagggccgagatgccacgcacactcaggacaggagtccctgcagggacgtaacctcagaggtaactccctgccctcgtgtgatcaggacggctgagaccgtggtgggggtcctcctccccaaccttcgtggagagaaagagggaacaccagaaggggacacagccacggccccctccgctcaccagttcctgctttatccccagcaaagagctctgggggcggtgaggagctgctgtcagcacaagggagagaaaccctgagacccgccggaggcaggccggcctggtccaagaagcagctcgaagaccaccctaccctgagagctgggaccctcactcccctcccggagcagacaggaggcttgcaggcagtgctaggcacccgagaggccattgtcccccatctggagctcccgcagttctgatgtacgcttaaaaatcccaacatgtcaagctcccacctcaccagggttcaagtacacacttcacagaacacacagatcctcctgtagcagcaccgcttaggcatgtgtggggccatttagttggggcacctgggctgtttctttaccatcttctcatgcagtagctacacatccactttgtcaaggcctcaccagtcacctctcaggtccttactgtgctccctccgcagatgagaaggagacgccagggcctggggaggcacgggcctgcctgcctgccccatagctgcaaacatgaatctgaacattttaatgctatttcccacaagctctcatagaagtgaactgctgtaactcagaaataaatttcaagggatactgtttcttggaagctgctcagttagaatgaatttggcctccctgcctagaaaatcactcttaaaagcaaacaggcctcagggtcaccaggggccgggatgatgcacagaggggttggggcatcggcgtcgaatgatccacggtgaccacttgacatgtgtccttagaaaagagactttgtggccgggcgtggtggctcacgcctgtcatcccagcactttgggaggccgaggcaggcggatcacgaggtcaagagatcgagaccgtcctggccaacatggtgaaaccccgtctctactaaaaatacaaaaattagccgggcgtggtggtgggcacctgtagtcccagctactcgggaggctgaggcaggagaatgatgtgaacctgggaggtggaggttgcggtgagctgagattgcaccactgcactccagcccggcaacagagcgagactcaaaaaaaaaaaaaaagaaaagaaaagaaaaagaaagaaggaaaagggactttgtggcccggcacactggctcacgcctgtaatcccagcactttgggaggctgaggcgggcggaccgcttgaggtcaggagttcgagacaagcctggccaatatggtgaaaccccgtctctactaaaaatacagaaattagccgggcgtggtcacgggagcctgtaatcccagctactcggaggctgaggcaggagaatcacttgaacccaggaagcggaggctgcagtgagtcgagatcacaccaccgcactccagcctgggtgacagtgacgctctgtctcaaaaataaaaaaaatttaaaaaagggcctttgcttctataaatgggatgaaaattaaaaatcctcttctctaagatagaataaatctttaatggaaacaaactgacctccatgggatcatgatctacttccaaaccccaagcttccaaatcccagcctgagggctcagacggaggacgcagctcagggagtcactggccgccacagcgtgggcagaaccatcctccatcctcacacagctcacagccttgtgtcctcatcttagcaactcggaataatctaatggaagagtttcacagttgccttggaaacccaagggatttaagactctaacaaaagtacacagccaaaatcacttgttggattctaaaaacaccttctgctcgacaactgcatttaaagcattcagcccacaggcttaaggagtgcactatttctcagtgcctgcatcgactctcataatacaaaggcctccagcacgggcacctgccagcgagttacgtgcacgcacagggaggtggcctgggaccactgggaggggcctcgctgtgctgacaacggaccctgcagcgcatctgtaaacatcagaataaaccccccaaagccgtgtctcttgccagggaccactgcttctcagattttagttggagctagtggaagattataaacagttacaagcagatggaaaggccactggccctgacctgctgcctgtacactctccacacgcacagcagcacatagagaaacgattttcccaactgctaatgtctggagacatttttggttgtaccaacgggggatccaaaggcaggtgctcctggcatctgtgggtggaggccacggctgctgctaacatcctgcagtacccaggacagcctcacgatggagcacaactcagcccgaggctgagttaaaccaactgctgttttttgtttgttttgaggttttttgatttgttttgttttgttttgagacagggtctcaaccctgtctccaggctggagtgcagtggcgcgatctcagctcaccgcaacctccgcctccctggttcaagagattctcctgcctcagcttcctgagcagctgggactacaggcgcgcaccaccacgcccagctaacttttgtatatttagtagagacggggtttcaccatgttggccacgatggtctcgatctcctgaccttgtgatccgcccgccttggcctcccaaagtgctggaattacaggcgtgagccaccccgcccggcctcggataacttttgtattagaaatgggatttcactactttgcccaggatagtcccaaactcctggcctcaagggatcctcatgcctcggcctcccaaattgcctccaaaagggattttgggcctgagcgactgcacgtggtcaccaacttttactgaacatccagggtctggccgtagctcagtgcaggacgcacagcaacaacagatgagaatgaataaaatctacattgtgtcaaagtagaacagcatttacccgcaggtggggtagaggcaagaggaaggtactgtatgacggatacagtttccctttgggatgatggaaaagttgtgatcgcagaacttcatgcgccacagaagggcattttggtcagggatggaccacagataaccactgtggtcccgtagattagaacgcagccgggaaattcctgtcacctggtggcgtgacaggaatagccatcgccatcctagccatcgccatcctagccatcgccacatcctagcacaactttaaaaaatcagtttagtgtaggccacgccaagtgtttataaagtctgcagcagtgcacagttctgtcctcagccttcatgttccctcagcactcgctcacccagggcaacctgcagtgcagcaagctctgtgcatggcaggggccctacccaggcatgccgttatcttgtataccctatttttacagcaccctttctatgtttagacacacaaacacttcccatggtgccacagctgcctgcagtgctcagcaccgtaactaacactggcaggtttgtgctgggcctataaccggctgcactttctagttttgtgacgggcgctccatgacgctcccagagcaacagaatcgcctagcgatgcgtttcttggaacctatccctgtcatcaagcaacgcgtgactttaatgccagtgaaatgtacatttgaaaatggttaaaatggtaaggtttacattatgtatgttctaccacaatgataaaagttaacgtattatcgagctgtgttcactcccggctctcgcagatctctcagcgacggagaggagggaccagggtcaggagaagaggccacacccgccctgcccaggaagccctccagccaggggggcaggcagcgtctcccactgcgccacccacacacggcatctgcgacatttttcagggcctcccaccctgcggcttgctgtctttcgtcctcctctgtccactcacgccctcccacgttcatttccaggcttcatcctggaggaacctccccacgggcagcacctgctaggacacctccatttcttctttcctttaattaagagacagggtctggctctgtcgtccaggctggagggcagcagtgcaatcacggctcactgcagcctggacatcttgggctcaagccatcctcccgcctcagcctcccaagtagctgaagtacaggcacaggcaacaccacacccaactccaaatatccttccttgacttgggccacagcctggggaaaagagcagaggccaaatccccacaattattattaatatcacatgcccagcaccatgaatggtggccagtattcagcaaacatttaatttattatttacaaatatggaagacacataagggacaaccattcaggtggtgacgtccagcttcaacagagctaagctcagagcccctttgcagtgagtaataggcaggacccaaggggagaccctgtatcatgaggtgtaagaaaaaacatcagccaggcgcggtggctcacacctggaatcccagcactttgggaggctgaggtgggtggatcacctgaagtcaggagttcgagaccatcctggccaacatggtgaaaccctgtctctactgaaaatacacaaattatctgggcgtggtggcacgtgcctgtaatccccagctaatcggaggctgtggcaggagaatcacttgaatccgggagacagaggttgcagtgagccgagatcacgtcactgcactccagcctgggcaacacggtgagactgtctcttttttttttttttttgagatggagtttcgctcttgttgcccaggttggagtgcaatggcgcgatctcggctcaccacaacctccgcctcccaggttcaagcgattctcctgcctcagcctcccaagtagctgggattacaggctacttttctgtatttttagtagagacggggttctccatgttggtcaggctggtcttgaactcccgacctcaggtgatccacccacctcagcctctcaaagtgctgggattacaggcgtgagccaccacacctggctgagactgtctcaaaaaaaaaaagaaaaagagaaaagagaggaaacaaacatcgcctgttggcttcaacagcagaacccacaggtgtcagcagacacaaaatccacttgccgggaaaggctgcttcttggctgtaacctctcaggtccccaggtcaaggcaagctgagccaccaaggacaaagtacattcacatggtgtttccattcaacattcactatagcaacagtgaccaaaggcagaagtccaggatgaaaagcctggagctgaaggccaccctggcaagcggccagtcgagttaccccagtcagggctcatgggagggtcccacaggccaggggaagccgaccctgcaggccacgccctcaccagggctgaggggtcccctcccggtgtcacccaccccccggctcacgtccctgtggcttcagaggggcccagcccaggcagcccccgtgtgtgggtgacaccagtgccgtgctgatggggacagatacacagggtctccaagggccctggtgatgccctgccctttgagatgcattggctgcattcccagcggtcacgacaacctcctgtaagaggaagtgaccctagaaagccaccagtgtgagcctggacatgcgtcactgcctccgcacagcacgcggccgtgaggcctggacacactggggcagctgagcccccgtaacgagtgaaaggcttacttgagtctcggctgctgaacggccaccccgacgtcggcaggaaggacggcaccggggagctggcccggctgtcatcttccacctgctgtgtgatgtgccggacggtctctttgtttttccgattcttccttcggcccgtgggctgccaggcatcaccagcactctgctctgagaaagagttctgtactgcaccgtccttggcagaaggcagctcgctccctccgtactgagacggtgaaacctgctcttccttgatgcgcagaggcccgtagcccacgtctccaggccatagaggctgtgaagaaacatcatcagggccatcggccttgggctcctgatcctctttcccgtagctgctccctccgtcgtgacagctggcgatggccgagtctccggaagaattggcaggactcgttcgccgtgccagccacggggagatgctcctcccagccatcacggccgagatgagagcttccgtgctgctgctggacgaggcgccgatctcgaactccgcaagctcatctgaggcgtccgacttgatgctgatgtccagcgccgccttgatgaagtcgtggcaggcttgcacgatgtccgtcatctgcaggaagctggcggctgacatcacctcgatgacgttcctgctggtgagcgccaggtgcgctgagtacatgaagtcgatgatggccttgaagccctgggccgtgacgatgtccaggtgcgtgaccgtggcctgctccgacgtcttctgcacctggcagtagagcgtcttgaagtagcggctgctgcccagcaggacgttcttgtgcgccttgaagaccttgccctccacgaccacgcagacgtcgcacaggacgccgtgctgcctctgctcgttgagctcccgcagcaggtgccggtagtgggacgtgatttccatatcttcctttcggttgttcatttggaagccctggtgtcgcctcttctacagactctgtggaggtaagaacaagagttacccaagctcagcacagacagaggccgtgagaggacgccgggcggggcgcaggagggccatggggcacagagtgcggccagtgggaggacgacccacgcgagagcccatccacaggtgtgcagcgggaggcctgtgtctccgcctgaagcagggcagcaaacaccggagggcaccagtgcgtccagggtgggacgtctgccacgtgtttccgtgctcgaggctaatggggttctgaacagaatcccacatacggcaactggcatatcccaggaacgatgagaacacccagccgtggctgagcaactcttacccaaactgagaactcggttaaatgacctacactgtggccatccctcacgcttgaagaaacattcttaaggaaaaagaataaaacttccaggctgggcgcggtggctcatgcctgtaatcccagcaatctgggaggccgaggagggtggagcacaaggtcaggagatcgagaccatcctggccaacatggtgaaaccctgtctctactaaaaatacaaaaaaagcagctgggcatggtggcgggagcctgtagtcccagctattcaggaggctgaggcaggagaatggcgtgaacccgggaggcggagcctgcagtgagccgagatcgcgccagtgcactccagcctgggcgacagggcgagactccatctcaaaaaaaaaaaaaaaaaaaaaaaacttcttacacaaaaaaccacagaataaggaattaaagcattcatagccttagtcctgaaaatttccaaaactctgagctcaaacgagctgaagtcttctggaggagggaggcttcctggcttaggcctgggtccctgcccagcactgggacagggcaggagggagctcaggccctgcggctgccagcgccctggacgtctgagacacgactggtctctgggtccccctcatcagaagacagccctgcctcacagagtcacaggacacacagaatcatttctgaattgggtacaccccgtcccggagtctctcctgtctctccttagactcagggatgtgagtcctccgcctgttctcgtctgctggggccgccctatcaagcctgggaggctcaaacaacagaaacgtattctcaagtccagaatcaggatgtcggccgagctggtgcctgttccagcccctcccccagccggcgttctgtgtggaggcatcgcacgagctctgcctctgtctcaacacggcttctcccggtgtgcacgtctgtgtccaaatgtcaccctttcacaaggacaccagtcgtccgggagtaggggcccacccccacggcctcatcttaattaatcatatccacagtgaccctgtttccaataaggtcacattctggggtcctagggggctagaacttccacagacaaatcgtaaggggacacgttcaccccacagccctgcctgggaaagaaacagtggttgggtctctcccgttacaaaccccattctccagctgataagtcaagtaggactcacctgaaatgctaaatgtgtttaataggagaaaactaagcgagcgtgggagtattacatgtccttccggcaaggagcccccacatgcagccctcatgggggacggggtcgggggctcagcagttttgtatcacacactcctgggctccgactggttacgacatacacaccttcacttagtcatgacagaatattttcttctttttttttttttgagacggagtctcgctctgtcccccaggctggagtgcagtggtttgatctccgctcactgcaagctccgctcccaggttcatgccattctcctgcctcagcctcccgagtagctgggactacagacacccgccaccacgcctggctgacatttttgtatttttaggagagatggggtttcaccattttggccaggctggtttcaaactcctgacctcagatgatccacccgcctcggcctctcaaagtgctgggattacaggcgtgagccaccacgcccagcctaaaatgtcctgagaaaagtaattattctgtctcacatttcacaggccgggaagatgaggtagaaaggagagagaagcttttgtgcctgtctctgccttcagggtcctgggccatcccctccttggatggtgtggggttcccaggcccccacagccggtgttgcctgccgggagacgcgctgcagaagaccgggcccagcctccccttcacttcctgcccgccgggcacgagggctgtgacggcggtgaccgctgaccattacaggaagggcctcaagcccccaagatgccaagaccaggcccccgcctgactccaggtgctgcctcaacggcggcagagaacaaaggccccatcccgccccacactggccccgggcttgagggctggaggcaaacgcgtgtgggtgcgagcagaacaaggagctgccgaaaaggaagagatgacattcggagcaggctgtggggagggggtcatgtgctgaggccgcccagtggttcttgaccggagagcatctcagagccccaggagggcagggcaggtgtcccaccaggcacagcttcacccagattaactaggcatcggggaagtgaccaaaacacacttcaaacccaggaaaacaaccattcaatcccgaagctggggggtccacaagtgacacctggctccgggccacgtgatgggaaccgtcaaaagctccaggcaccctgtatccaggctaggaagctgaccgatcatatttaatttcctacgtgaataaaacgtctctttattcatcaggaaaacagagcctgtaagaattaaggagaactatgaaaacaacaacaaaaaaaatgccagagattttatagaagcagcggctacctcacaacggtccacacctccacgtaagattttatagaagcagcggctacctcacaacggttcacatctccacataagttcaacttaaatcaaaagttctgaaatacatttaataatgtatttcaatccaatcagggcagcttaaaatcagttatatactcagagattttatagttaaaaaaataaataaataaaattttcatttgggaaaaaagttatctgtcaggccaggcgcggtggctcacgcctgtaatcccagcactttgggaggccgaggcgggtggatcatgaggtcaggagatcgagaccatcctggctaacacggtgaaaccccgtctctactaaaaatacaaaaaatttgctgggcgtgatggcgagtgcctgtagtcccagctactcaggaggctgaggcaggagaatagcgtgaacccgggaggcggagcttgcagtgagctgagatcgagccactgcactccatccagcctgggtgacagagcaagactccgtctcaaaaaaaaaaaaaaaagttatctatccactaaaaggaaaaaagtaacaatcttttgcagtggcacgatctcggctcacggcagcctccaactcctgggctcaagcaatcctcttgcctcagccacccaagtagctaggaccacaggtgcacaccccaatgcctggctaactctttcattttttgtagtgacaggagtcttgctttgttgcccaggctgatctcaaactcttgggctcaagcgatcttcccacctcggcctcccaaagcactggaattacaggcgtgaaccaccacaccctgacaaaaaacgataatcttcaaaagagattagtcagctacggaaatattaagaatacacataatctctctaagcccagaacagggaagttctaggagaatatttgaatttacatttcaaattcaataatctctcagcatcagaaatctgctcgtggggccacgtcaaccccactgtggtagaagagcagctgcaaccccaaaacagaagcacccggggctactcaggctcgacacgcaagcagcggacttgagctcacaacccgtattctgtgtgggaagcacctgccctggcctggaggagcacaagatctaacggacacacccctggccacaggacacacctgtgggcagacagctgcatccacaggacacacacctgtttgctgggcacacctgtggctgcggcaaaggctcacaagcacttggtacatctcaggtccccgtgtggcacccccgtgcgcgaggtgccccttcagagaggagctcccgatccacactggggcacaggtgccaagtctccaaagagtgggtgctgcgggctgcagggaccaaggggcacccgcggctgcactgatgtcaggttgcccaatagctaccctagaccctcagagggacgccgcctctgctgtctcctccaaacaccgcctcagctttttctgaggcttcttggtatctgctttacttatatatcacgaatctcaagatccttcccttcaaacagaatcgcttatgaaacgggcatcagcataaccactctggtgaccacaacaacctgaagccatgctccaaactcacaagccgcgtcaccgtgcaggtgctgggggcacaaacccacgcatggctctgcctcaaccgccgacaaccaggtgcacgggacgctgcgcagttacaccgtgcaggctctgccccaggtgcacaggacgcggtgcagttacattgtgcaggcagtgaggggggctgcgtggggcctgtcctgccaggcaggcaatgcgccagcacactgtgcttttgggggctatttcaaaccccaatagccaccaggagagggagaggtggtctccacagtgcacgctaacgaactgagggcctcaaaaccagcacagctgggagggattcagcggcgagcctgtgcttctaggtccaaagcccgggtgctcccacccatcgtgccgtcctgtgctggcaccaggtcggccaatcctccctgggatccggggagcaaggtcatgcacctgtgtccccagcagaatgaccaccggcaaacaggctccgccaaacgtggcttctatcctcctcctccctgggtcagctggagtgaaggaagagtggcctctgccgaatgcgcataggaacggcccagcctctagggccatcttggaagtggcggtgcccatcccaaatcctctctccaacagactcccggaaggtgacgggtgtccatcattgagcgcctttgaagactgtaaacaggcgcgctgctgttgaggacgcacacttcccactcactccaatcctctcatttgaggacgaatgtgccctggccacagcctggatagatgcctgtgtcgcaggacgcagaccaaggaaatctgaagaccgcgatgaatatactccatttgctgcactgtgtgttcaaagtattaatttagggggcagactggggttatttttccccgcgtccctaaggagctctgcccggaaggctgtttgttctaataaaaatgtaaaacagcaggcgtgattcaggcggtagtgtgtctgccgcatccaccggacgcccgatccgcgtagggcacaaggcagggagggcgggaggcctcgggtgccccctgctggcagcgcctggcacgcggcgtcccgggcctccggctcctcccctagggcccatccctgcgtctaattccaaaccactcagcgggcaagaacgaccctctcaaacatcaactcacactgttttaccacattcacacttgatctctctgttttgcctctgacttgaaacctgcatttccgttaggctccacttaaacctttcatttaaaattctgcttaaggccgagtgcggtggcgcacgcctgtcatcccagcactttgggaggccgaggcgggcggatcacctgaggtcaggagttcaagaccagcctggccaatatggtgaaaccccatctctactaaaatacaaaaattagcaggacgtgatggcaggcgcctgtaatcccaactacttgggaggctgaggcaggagaatcacttgaacctgcgaggcggaggttgcagtgagccgagatcataccattgcactccagcctgggcaacaagagtaagactccatctcaaaaaaataaaataaaataaaaataaaataaaataaaattttgcttaaaatgtaatctaacaggccaggcacggtggctcaggcctataatcccaacactttgggaggctgatgcaggaggatcacttgaggtcaggagttcaagtccagcctgggcaaaatggtgaaacccggtttttgtttttgtttttttatatatactttaagttctaagggtacatgtgcacaacgtgcaggtttgttacatacgtacacatgtgccatgttggtgtgctgcacccattaactcgtcatttacattaggtatatctcctaatgctatctctcccccctccccccaccccacaacaggccctggtgtgttccccaccctgtgtccaagtgttctcattgttcaattcccacctatgagtcagaacatgcagtgtttggttttctgtccttgtgatagtttgctcagaatgatggtttccagcttcatccatgtccctacaaaggacatgaacgcatccttttttatggctgcatagtattctatggtgtacatgtgccacattttcttaatctggtctatcattgatggatgtttgggttggttccaagtctttactatcgtgaatagtgccacaataaacatacgtgtgcatgtgtctttatagcaacatgatttataatcctttgggtatatacccagtaatgggatggctgggtcaaatagtatttctagttctagatccttgaggaattgccacactgccttccacaatggttgaactagtttacagtcccaccaacagtgtgaaagtgttcctatttctccacatcctctccagcacctattgcttcctgactttttaatgatcaccattctaactggtgtgagatggtatctcattgtggttttgatttgcatttctctcacggccagtgatgatgagcagtttttcatctgtctgttggctgcataaatgtcttcttttgagaagtgtctgttcatatcctttgcccactttttgatggggttgtttgattttttcttgtaaagttgtttaagttctttgtagattctggatattcgccctttgtcatgagtagattgcaaaaatttcctccgattctgtaggttgcctgttcactctgatggtagtttcttttgctgtgcagaagctctttaattagatcccattcatcaattttggcttttgttgccattgcttttggtgttttagacatgaagtccttgcccatgcctgtgtcctgaatggtattgcctaggttttcttctaggatttttatggttttaggtctaacatttaagtctttaatccatcttgaattaatttttgtataacgtgtaaggaagggatccagtttcagctttctccatatggctagccagttttcccagcaccatttattaaatagggaatcctttccccattccttatttttgtcaggtttgtcaaagatcagatggttgtagatgtgtggtattatttctgagggctctgttctgttctattggaaacccggtctttacaaaaaatacaaaaattagctgggcgttggccgcgcgtggtggctcacacctgtaatctcagcactttgggaggccgaggtgggcggattacctgaggtcaggagttcaagaccagcctggccaacatggtcaaaccccgtctctactaaaaatacaaaaattagccgggcatggtggcacatgcttgtaatcccagctactcaggaggctgaggcaggagaatcacttgagcctgggaggtggaggttgcagtgagccaagatcatgccactgcactccagcctggccaacagagctagactctgtctcaaaaaaaaaaaaaaaaaaattagctgggcatggtagtgcacacctgtgagtcccagctactaaggaggctgaggtgggagaatcacctgagcctgggaggcagaggatgcagtgagccaagatggtgccactgcactccagcctgggtgacagagcgagactctgtctaaaaaaaaaaaaaaaaatgtaattaacagataaatcaccattttaaagtggaagcaagatacccttggctctagaatcaaactgccagtggccaggagggctctggggaagacaaaggtggccgcagccatctgtccagatcaagtttaactcacctactctaagaactgctctccacaattattttggtgaaactgttttgttttcagacaaggtgtcactcagtcacccaggctggagtgcagtggcatgatcagggctcactgcagcctccacctcccgggctcaagcaattctcccacctcagccccctgagtagctaggaccacaggtgcacaccaccacactcagctaatttttttttttttttaatttcttacagagacagggtttcaccatgttgctcaggctggtctcgaagtgctgggctcaagccatccaccagcctcagcctcccaaagttctgggactacaggcgtgagtcatcacgtgtggcctggtgagactaacttttttttttcttttagatggagtcttgctgtcgcccaggctagagtgcagtggtgcaatctcagctcacagcaatctccacctcctgggttcaagcgattcttgtacctcagcctcccagggaagctgggattacaggtgtgtgccaccacacccagctaatttttgtaattttagtagggacagggtttcgccatgttggccaggctggtctcgagctcctggcctcaagtgatcctcccacctcagcctcccaaagtgctgggattacaggcacaagccaccacgtgtagcctggtgaaactaatcttttagcaggaaaacgttttgaacagacacatcacaaagaagaagcatcagcaggcacacatggacagaggcttccccagctgtcggggaagtgcgcccggaaccacagcaagctcccccatgagagtggccaggactaagaggcaaggccacaccatgtgtcctcgaggacacgagcacctggagcctgctcagctgctgagggcacatggaacggtgcagccgctgtggaaaacagttcagcaaagctgaactccacaggacccaacaactccggtacctacccgagaagcaaaaccacctgtccagacagactcatgcgtgaacgttcacaccagcttcgctcagaacagccaaggtttgggaacaacccgaatgtccaaatgtgcatcaacaggtgagcaggtaaacacgggatgcttccaaactgcagaggcagctcaggcacaagaaggggctgctgggctccgtcccggcctcggcaccctggggcacctccctgctcagccttccgtccccctatacaggtcacatccacgccacacggattatcccacagttacgctgagtaagagaagacagtcaccaaggaaagcgtgtgattccctttataggaaactctagacaacagaagtgagtccacagtggcagacaaccggccaggggctgcctgggctggggtagggggagaggctgcgggaagctcctgtggtgatggtgagagttgacagcatgctggcaagccctcacagccctcactcactcttggcgcctcctcgacctcagcgcccactctggctgcacttgaggagcccttcagcccgctgctgcactgtgggagccccttcctgggatggccaaggccggagccggctccctcagcttgcggggaggtgtggagggagaggcgtgggcgggaaccggggctgcgtgcggcgcttgcgggccagctagagttccgggtgggtgtgggcttggcggccccacactcggagcggcccagggcaatgaggggcttagcacccgggccagcagctgcggagggtgtccgccagcagtgccggcccaccggcgctgtgcttgatttctcgccggccctagctgcctcccctcagggcagggcttgggacctgaagcccgccatgcctgagcctccccctccccgcagtgggctcctgcagagcttccctgacgagtgcccctccctgctctaccgcgctgggtcccatcaactgcccaagggctgaggagtgcaggtgcacagagcgggactggcaggcagctccacctgcagccccagtgccggatccactcggtgaagacagctgggctcctgagtctggtggggacttggagaacctttatgtctagctaagggattgtagatacaccaatcagcactctgtgtctagctcaaggtttgtaaatgcaccaatcagtaccctgtgtctagctcaaggtttgtaaatgcaccaatcagtgctctgtgtctagctgatccggtggggacttagagaacctttatgtctagctgagggattgtaaatacaccaatcagcactctgtatctggctcaaggtttgtgaacacaccaatcagcgccctgtatccagctcaaggtttgtgaatgcaccaatcagtgctctgtgtctagctatctagtgaagacttggagaacttttgtgtctagctcaaggattgtcaacgcaccaatcagcaccctgtcaaaatgggccaatcagctctctctaaaacagaccaatcagctctctgtaaaatggaccaatcagcaagatgtgggtggggccaggtaagggaataagagcaggctgccccaaccagcagtggcaacttgctggggtcccctttcatacattgaaagtgttgttcttttgctctttgcaataaatcttgctgctgctcactctttgggtccacactgtctttatgagctgtaagactcaccgtgaaggtctgcagcttcactcctgaagccagccaagaccacgaacccaccagaaggaagaaactccaaacacgtctgaacatcagaaggaacaaactccagacacgccgcctttaagaactgtaacactcaccgcgagagtccatggcttcattcttgaagtcagtgagaccaagaacccaccaattccagacacaatggggacggcctgtgtctccaaagccaccggcagctccacccaagagttcgagctcatcagattatgctcgttaaacaagtgctgtttgctgcacgtaaattatgcctcaataaaggattagtttttgtaaaaatatttttcctcagctataatcctgtgcttatccaaggacctcactgccatttgttacgggttgaaccccccgcccccgcctcccaaattcatgttgaagccctaacccctcatatttcagaattccaccttatttggaaataggtcattgcagatgcaattaattaagatgaggtcgctggggctggacacgatggctcacacctgtaatcccagcactttgggaggcagaggcaggcagattgcttgaggccaggagtttgagactagcctggccaacatggtaaacccccgtctctactaaaaatacaaatattagccgggtgtggtggcgcacgtctgtaatcccagctactcaggaggctgaggcacaagaatcacttgaaccgggagacggaggctgcagtgagctgagattgcgccactgcactccagcctgagtgacagaatgagaccctctcaaaaaaaaaacaatgaggttactgggggcccctaatccagtatgataagtacccttaaaaggggaagaaatttggacacaggtcggcacaaagcggcagcggcggaggccccggcaagaggctggagagaggcctggagcagacccccagcaccctcccagaaaccgcggcgggccgacaaccgaacctcagacccccagcaccctcccaggaaccgcggtgggccgacaaccgaacctcagacccccagcaccctcccaggaaccgccgcggccgacgaccgaacctcaggcccccagcaccctcccaggaaccgcggtgggccgacaaccgaacctcaggcccccagcaccctcccaggaaccgccgtggccgacgaccgaacctcaggcccccagcaccctcccaggaaccgccgcggccgacgaccgaacctcaggcccccagcaccctcccaggaaccgcggcgggctgatgcccaaacctcagacctccggcctccaggactggagggaacagatgtctgttgtttacgacgttccctttgtggccctttgacatggcagccccaggtcactgacgccccgtttctaccaccaaagagcgcgatgccacagacgccaacaggaggaaacacgtttctgggcagctctgcccactcttgcgaagaaacccaccaacccggctcccccagggcacctcaccagcaggaaccaggcgtgggcaccatcccccaggatgccatccaggcagggaccagtgtgggcaccatcccccagggcgcctcaccagcaggaaccaggcacctcccctcacaccaaggcgttcatggtttaccttcttctgaaaaaattaaggttaagacatgaatactgtgaaactgtcgtacaaattaaatttcatatacatcatattaccattgttcgtggtcgcatttcaaaatttttaagtgagctcctgactagaaaacactccaagacatgttagcagagtcgtctttcgacagcgagaccggtggtactatccacatcatctccagtgagcaagtgggtgctggcgatgaggactttaggttttccacatggcagcccccatgtggccatctgaagatgcaaagccatgtctgccggccccgggctgcccaggccccgggctgcccaggtctctgtcggaggccctgccagccccgcccctccctgcccactggcccctttcagttccttcatctccagcccggctctgacgcccaggccgcctcctccgccttcccgaacctggctaccgtcacttccttctttttgtttttgtaatggggtctcactctgtcccccaggctggagtgcagtggcgcaatctcggctcactgcagcctcaacctcccaggctcaaggcatcctcccacatcagcctcctgagcagctgggaccacaggggcacgccaccacacgggctaatttttttgttttgtagagacggggttctgtcgtgttgcccaggttggtcttgaattcctaaacgaacctgccgccctggcttctcaaagcgctgggatgataggcgtgagccactgcaccgacataacgtcacttccttctgtcgggcgtccccagccagagcccagcacgcttcccctttccaaacacctctcactgccctgcgctgtcccatctcagccccagccaccagggtctcggtgggctgtggggtccctgaatggaggggcttccactcccacctcagcagctccaggcctcagcatccctccagctccagccaggtgcccaccagtcacacgcaggggaagcctggagcagtgcctggctcgggccatgtgtgagggtggcaggggtgcctccagatgggcacaaggtgctctgggcacccaggagggggccggggcagctgagctcctagtctgtcatttgggttatagatgacacagtggaacaggtcagatctgtaaaggcgaatcctgccatgaatcacaacagcagtcctgagccctctcagccaatggacacagcctccccctcctccaggaagccctcccgggcgtcactgttcttacactgacagcacacatgccacctcgctgcctgacactgccctgccctcctctcagcccagggaccacatctcaatgctggacaggcccaacacatacacttggggtcaacaaaactacagtaccaggccgggcacggtggctcacgcctgtaatcccagcactttgggaggccaaggcaggtggatcaccaggtcaagagatcgagaccagcctggccaacatggtgaaaccccgtctctaccaaaattaaaaaaattagccaggcgtggtggggggcgcctgtagtcccagctactcgggaggctgaggcaggagaatcgctataacctgggaggcggaggttgcagtgagctgagttggcaccactgcactccagcctgggcaacatagtgagactccgtctcaaaaaaacaacaacaaaaaaaacctacatgacttttttttttttttctcagaaggagtctcgctctgttgccaggttggagtgcagtgacacgatctcagctcactgcaacctccacctcccgggttcaattgattctcctgcctcagcctcctgagtagctgacattacaggctcacaccaccatgcctggctaatttttgtatttttagtagagacggggtttcaccacgttggccaggatggtctcgatctcttgacctcgtgatccgcccacctcggcctcccaaagtgctgggattacaggcatgagccaccacgcccgacctacagtaccttttgaaaattaaatctgtaatactgatttacagtatttcaaaaatgtctcatactaagtgctgatagaaggtaaaatgaaacagcagccgggcagtgtggtacacacctctaatcgcagcacgttgagaggctgaggcggcagaatcacttgagcccaggagttgcaggctgcagtcagtgagctccgattgcaccactgtgctctagctggagtgacagagcaagacccccatctctaaaggaaaaaaaaagacacagggaggagagaaggtcatgtgaccacaggcagaaactggagtgacaaagtcacaagccaaaggatgcctggagccaccaggagctggaagaggcaggaaggaccctgcctggagtctccagagggagcatggccctgagacaccctgagttccagcgctggactctggaactgagaggagacacctctgctgccgcgagctgcccagcaggtggtactttcacagcagccccaggaaactaatacacaaagccatgcatcagcttttttttttttttccttttttttgagacggagtctcgctctgtcgcccaggctggagggcagtggcacgatctcggctcactgaagccttcggctcactgcaacctccgcctcctgggttcaagtgattctcgtgcctcggcctccccagtagctgggattataggtgtgtgccaccacacccggataatttttttgtatttttagtacagacagggtttcaccatgttggccaggttggtctcgaactcctgacctcaggtgctctacccgcctccgcctcccaaagtgctgggattacacgcatgagccaccatgcccggccccaacttttaaaaatattataattttctcagaaagctaatcagctggctgggaaaggtggctcacgcctgtaatcccagcattttgggaggctgagacgagcggatcacctgaggtcaggagttcgagaccaacctggccaacatagtgaaaccccgtctctactaaaagttaaaaaaaaaaattagcctggcatggtgacgggtgcctgtaatcccagctactcgggaggctgatgcaggaaaattgcttgaacccgagaggcagaggttgcagtgagccgagaacatatcactgcactccagcccaggcaacaacagtgaaactccatctcaaaaaaaaaaaaaaaagaaagaaaagaaagctaatcagcttaacaaggcaagaaaactatttgtgtacattttaaatctgagatactgctatggctaactctgacctgaaatggtaacttcaaaaaaaatagaacctaaataagaaggttgtaatacctgcttaaaataaaggcaacactatgctctcaaggaatatgatggaatctttctctttttttgagatggaatctggctctgtcacccaggctggagtgcaacggtgcgaccttggctcactaaaacctccacctcccacgttcaagcgattctcctgcctcagcctcccatgtagctgggactacaggcgcccaccaccacgcccagctaattgttttgttttggtttttttttttgagatggagtctcgctctgtcggccaggatggagtgcagtggcgccatctcggctcactgcaagctccgcctcccaggttcacgccattctcctgcctcagcctcctgagtagctgggactaccagcgcccgccaccacacccggctaattttttgtatttttagtagagacggggtttcaccgtgttagccaggatagtcgcgatctcctgacctcatgatgcacctgcctcggcctcccaaagtgctgggattacaggcgtgagccaccacgcctggccaggattggtgttaattcttaaaatgtttgatagaattcaacagtgaagtgatatatacaatcatatacatatatagagagagacagagatggacttttcttttgttggaagtttattgactattgattcaatttctttattgaaattgacttttctttttggaagctaaaaagtacaataactgtagtgaaagtttctgaacttttctttcattggaagttttttgactactgattctttatttgttataggtctattcagattttctgtttcttcttgagtcagtttggtctcgctctgtcacccaggctggagtgcagtggcgccatcttggctcactgcaacttctacctcccgagttcgagtgattctcccacctcagcctccccagtatctcggactacaggcgcacgccagcatacctggctaatttttgcatttttagtaggaacggggtttcaccatgttggccaggctggtctcgaactcctggcctcaagcaatctgcccgcctcggcctcccaaagtgttgggactacaggtgtgagccaccgcgcccggccttcagctactccattttttaacattttgccgcatttgtttacatcaagcaatatgatagaatccctaaccagttactttttgcttaaaagctgtactaggccaaaacaagcgaagcacccgtctgtgtgaggcagcgggtctggcttacaggcggcgcctcagggctcgctccccctccgagcgggtctcactcccagagcggggctcgcccggtgtctggcctccgaggccgtgtgcccaagtccccaccttgtgcggcacaggcccttcccacaggggacactcacggaagctgaacggaccttcccacaggagacactcacggaagctgaacggaccttcccacaggggacactcacggaagctgaacggaccttcccacaggggacactcacggaagctgaacggaccttcccacaggggacactcacggaagctgaacggaccgacggaggtggcgtggatgagcagcagccgcctgagcagtgaggaaaccccgcggacagcgcggtaaggaccccacccagattactggatttcaccaccggccgccttcgatggaggagtcctcagtctccacatccgcacggcacagacggagggggggcccatggggccccagcgatgaacctgtcaggggtcccctgtaccctgtaggccagtcaagccatccttcccagcccttgccccgggggctgagcgcaggggagggcccggaaggcagacgccacggagcccggggcttcaggggggcgtggggcggaagcggggccagggcggaggtcacggacagggtcatccggacccacaaggagtctcagccccgggcccggcgggagggaagggggaagccaggctcttcctcctagggcagggcctgggctccggggcagtgtgacctcccgcccctaagcgagtcctgcctccccatgagacctgagctcctccagcgtgggtgggaggcggacagagcctcccccagagaaggccctcctcggtccagcgctcggccaggacaggcgccaaggccgccttaagaaataaaaccagcaggcgcggtggctcacgcctgtaatcccagcactttgggaggccgaggcgggcggatggtgaggtcaggagatcaagaccatcctggctaacatggtgaaaccccgtctctactaaaaaatacaaaaaaaaattagccgggcgtggtgggggcgcctgcagtcccagctactcgggaggctgaggcaggagaatggcgggaacccggggggcggagcttgcggtgagccgagatggcgccactgcactccagcctgggcggcagagcgagactccgcttcaaaaaaaaaaaaaaaaaaaaaaagaaaaagaaaaaaaaaaaagaaagaaaactccatgattcatgaggtaagacctgggagctggcggctcggtgctccggtgctgcagaggcactcaaggggctctccacgttcgccttccacgttccccttcgcagggaccgcagcgcctggggcacttcgccatgggcttggccgaagtgggcactaaaggtgcagactcggtggagccaaggggggcaaggtcagcagccctgggggcgcagccctgggggccccgccgtgggccacgcccagcgcgtccagtcctcatggccgcgtctattccaggaatggggtcctggggttcggcacaggcctgctggggtggtggccccacatcttgcctgtgtccccccatattatgcccaagggagcaacaaaggccacccctgggtccaggcctcaggagctcacaggagccctgagcccagaagacagcagcgccctcacgcggtcctcagcaaacctgccagagcccagcaggtggagaggactccgggagacagcaggagctccgcgacctcccttcctctcccctcttctcccttacgaagttagccgtgtggtggccagtgtggcttaactcaatgatacaattttaaagatttctggaaaggacttaaaagacacgtgcttaactctgagaaaagatttcaaggccaggccagaatggtggctcatgcctgaaatcccaacgctgagggaagccggggcgagcagatggcttgagcccaaaagttcaagaccagcctgggcaacatggtgagaccccatctctacaaaaaatagaaaaaattagccgggcatggtggtgcacacctgtagtccccgcgactctggaggatgaagtgggaggatcccttgagtcgggaggtcgaggttggagtgagccaagatggcaccactgtactccggcatgggtgacacagcaaggccctctctcaaaaaaaaaaaaagaaaagaaaactctaaatacatggaactggcaaacattaacgtaatgtcaattacaaaggtggccgtgacacaggaggcccagagtggggcggcccttgaagcagcctgcagcgtggggatgaggcctacagatgcctctgcctctttgactaattccacttctgagactctgccccaaggaaataacccaaaaagctaattggttccaagatgttccaagcactgctatggctaacagtgacaaacagaaaaagacccaaacactcgacaattcgaagatggcccagaaaaccgtcaagtattaaaactgagcaaaacccaattccaggaacattaaaaatgccagtcacgtggatgcttagaagtttatcagaaattaacgggaagaaatgagaacagaaagcccagctggtcgtgtctgcacaagctcacacacaccgaccacactcaggataggcaccaaaaccccccttcccctcgcaaaccaaggtccttattcataaaacacaaatgtaatcctagcactttgggaggctgagacaggtggatcatatgagatcaggagtttgagaccgtcctggcctacataacgaaactctgtctttactaaaaatattaaaattagctgggcgtggtggcacgcacctataatcccagctactagggaggcagaggcaggagaatcgtttgaacatgggaggcagaggttacagtgagccaaaattgtgccactgcactccagtctgggcaacagagtgagactctgtctcaaaaaacaaaaaaataaataaaaataaaacacaaacgcgagaacgtgcccaccagcacagatgcagggtaggatgacgccacaggaaatcagcacccaggaggtgaacagagcgcgaacatgagagcaatctacgtttctctttcctcactcctacgaggagctccagcagcagagccggagagcaccagctggcgtccaggctccactctctttcctcactcctacgaggagctccagcggcagagccggagaacactggagagcaccagccggcgtccgtgttccactctctttgacttttcacaaacccaacaggcaggcgaagagtctgcctctctgggtcccagaaccccacaggatgggcatgagccccaccccgcccagcccacagaggcgagtctgggtcccagaaccccacagaatgggcatgagccccaccccgcccagcccacaggggcgagtctgggtcccagaaccccacaggatgggcatgagcccccctaggggcaagagacgacaacaggtggacaagatgcgagccaccagcccactaggacctcggagctgccatggggtgggtctccctgaagaagagtcaagcagccttcctctccccagccccaccccacctctcatacagaagacactacagccccaggcctcccagcttctgacttccaggagcagaagtaagttcttccacagggcaggaggggccctggaaggatacgactgtcacctcctctgaaagtatttccaggaagcccactgtgctcatagccataggcaacgcagagagcaggaagatctcgggggtgcagagagggggtggcccataggtgacgcagacaactgaccctgacccctgggcccagcagagatctgcacgtgtgagggtcagctctgagctgggcgacgggccagccggctcaccttgcagccaggtgagctctaccccgctgggaagagagctgctgctgtctgactccctgccacatgaggactcaggactcactgggcaggtgagccatggtgcaggaacaaacccctttcatccaactctgccataagacaaaatgttagaatcacagtccctgtcactaagtagcacatctatttcaccaactcccacttttctgccaggtctggctcatacatcgttcagaccaagtacttgcctgggaaaaaaaactaaagtaaaaatagctcttagactccaaacgtggaagcattaaaatattcaaaagaactgaccctgcagatattgaaacaaggctttagtgctgacccaccaaagtggcggcgatcttttcggaacaaaactctcactaataggaaaactccaaattcaggcaaaatttgcatcaacttttcctacataaaaaaaagagaagcaacggtaaactacatttgcatttttagtaaaaactaaatgaaaatcaacttgaaataagaaaattaacattaaaatttttcacaaggccaggcaaggaggctcaggcctgtgatcccagcactttgggaggctgaggcgggcagatcacgaggtcaggagatcaagaccatcctggctaacatagtgaaaccccgtctctactaaaaatacaaaaaattagccgggcaatgtggtgtgcacctgtaatcccagcactttgggaggcggaggcgggcgaatcacgaggtcaggagttcgagaccagcctggccaacatggtaaaaccccgtctctactaaaatacaaaaaattagccaggcaatgtggtgcgcgcctataatcccagtgctttgggaggtggaggcgggcgaatcacaaggtcaggagttcaagaccagcctggtcaacatgtggaaaccccgtccctagtaaaagaaatacaaaaaattagctgggtgtggtggcaggcgcctgtaatcccaactactcgggaggctgaggcgggagaatcacttgaacccgggaggtgggggttgccatgagccaagaccaccccactgcactccagcctggtgacagagccagactccatctcaaaacaaaaaacaaaacaaaacaaaacaaaaactacggctgggcgtggtggctaatgcctgtaatcccaatactttgagaggccaaggcaggtggatcatgaggtcaagacattgacagcatcccgaccaacatggtgaaaccccgtctttactaaaaatagagaaaaatattagctgggtgtgatggcgcgtgcctgtagtcccagctacttggaaggctgaggcagcagaattgcttgaacacggaaggcggaggttgcagtgagccgagatcgcaccactatactccagcctggtgagagtgagactccgtctcaaaaaaacaaaacaaaacaaaaacaggcatcaaaatatgaaacaacccgtgttttaaaatacattaagttggggccaggcacggtggctcacacctgtaatcccagcactttgggaggctgaggcgggtggatcatctgaggtcaggagttcgagaccagcctggccaacatggtgaaacctcgtctctactaaaaatacaaaaattagccgggtgtggtggagcgcgcctgtaatcccagctattcgggaggctgaggcaggagaatcacttgaacccaggaggcagaggttatagtgagctgagactgtgccactatactccagcctggagacagagcaagactccatctcaaaaaaaaaaaataaataaataaataaaatacattaagttggaaattccaatgtaagcattgtggctacacaccagagtaactgctcccctgccactgccctgcgcgggcgagtcccagccctcccgcctctacctggttctactgacggctcaggcaggagttcaaggtcacaaggatgcacccagccagaccttcaggtaggaagtgtcacagaaccaaaactgatccttcagcaaataagtagcatgaaacagagagaagaaacgcaacttcagggacatcaccacccacaagcagcacatggccctcatcccaactctgattcaagtaaagccacagtgaaaatgtgcaggccacagtcaagaacgctgagcccagcccagcatcgcgacgctgaggaagtgttgcggggtgcccggctgcgtgtgagccacacacaacgaagcaccgagggtaaaactgagatttgctttaaaacacttgagagaaaaaacagtgggaagggccgggcgcggtggctcacgcctgtaatcccagcactttgggagaccgaggcgggtggatcacaaggtcaggagatcaaaaccatcctggctaacatcgtgaaaccctgtctctattaaaaatacaaaaattagccgggcatggcagtgggcgcctgtagtcccaactactagggaggctgaggcaggagaatggcatgaacccgggaggcagagcttgcagtgagccgagatcacgccactgcactccagcctgggcaacaaagcaagactccgtctcaaaaaaaaaaaaaaaagaaaagaaaaaaagaaaggaaaaagaaaaaacagtgggagagagtgggagagatgagtaagacaagagcagagcactgggggttcccgcagccaggcgacgtggacgttctctctaattttgtgtatgtttgaaaagttccaaaataagtttttaaaaatataattaggttttaaaataataatataacttttacaaaactgggaaaatatacaatccagcggtgcaaatgcggtgagagagaatctcatctggaaacccacaggcagccccacccctcaacaggaggcccaagacctgcctctgcagggggagagaaccccaagacctgcctcctcccacccccaggcaagggtcctcatttggggttgacctcccagaggagtgcagcaagcctgggcctcaggagtctgactgtgggtgacaagccacagacacagccatgtccacatcgcaccatggccaccgcaggcaacttagaatgctcgatactcaccctacttcggaattaggaatatcagatgcaccattcacaatgctatgtgctaaattaaagttccacatgttactacctcacaaatcaaactttcctgaattttagcaatgatatttcagtagttgctacccttcattttccagggatcttactggatgcactaaaaatgctattgtgagctgatcatggtctcacatgcctggggtcccagctactcaggaagctgaggcacaaggatcgcttgagcccaggacgtcgaggctgcagtgagctgagattgcgccactacactccagcctggatgacagagcaagaccctgtctcaaaataaacaaacaaaacatgctattctgaaaaggggccacagctcaccagctgctgagaagacacaaaaggccgagagcccaagtctgagctgaaggcacaggtgcagtgggcccaggtgcagtgggcgcaggtgcagtgggcacgagtgcaagtgcagtgagtgcaatgggtgcaggtgcagtgggtgcaggtgggcaccggtgcagtgagtgcaggtgcagtgggcaaaggtgcagtgggtgcagatgggcacaggtgcaggtgggcataggtgcagtaggtgcaggtgcagtgggtacaggtgggcacaggtgcagtgagtgcaggtgcagtgggcaaaggtgcagtgggtgcaggtgggcacaggtgcaggtgagcacaggtgcagtgggtacaggtgggcataggtgcagtgagtgcaggtgggcacaggtgcagtgagtgcaggtgcaggtgggcacaggtccagtgggtgcaggtgcagtgggtgcagatgggcacaggtgcaggtgagcacaggtgcagtgggtgcaggtgggcacaggtgcagaaggtgcaggtgcagtgggtacaggtgggcataggtgcagtgagtgcaggtgggcataggtgcagtgagtgcaggtgcaggtgggcgcaggtcgagtgggtgcaggtgcagtaggtgcaggtgagcacaggtgcagtgggtacaggtgggcacaagtgcagaaggtgcaggtgcagtgggtacagatgggcataggtgcagtgagtgcaggtgagcacaggtgcagtgagtgcaggtgcaggtgggcgcaggtccagtgggtgcaggtgcagtgggcacaggtacagtggacacaggtgggcacaggtgcagtgggtgcaggtacagtgggcacaggtgcagtgggtgcaggtacagtgggcgcaggtgcagtgggcacaggtgggcacaggtgcagtgggcgcaggtgggcacaggtgcggtgggtgcaggtgcggtgggcgcaggtgcagtgggcacaggtgggcacaggtgcagtgggcgcaggtgcagtgggcgcaggtgggcgcaggtgcagtgggtgcaggtgcagtgggtgcaggtgcggtgggcacagatgcagtgggcacaggtgcagtgagcaaggcaaagggggtgcccagaggagggcccgagtcctgcttcggattgggaggcacaagcagccgcaacactcagctgcccctcttggctccatctctgctcaccctcaacatgactccctccccacccaccccgtgtctctcctcacaggctcacatcacccaagatactcaaagcatctcccccatctgcataacccagcaaagcaaggactccatgacctgctgtgtacccaggccaggaacctgacctgccacaggcccagggctgcgtgcacactggctgaatgcattagttaatattttggtgacgctggttacttgccacctctgctgtaaataacagcagcgtcaaggatacagtggccacgagaggtagcagctgctgatgtgtggagaagcctccatagagaaatacgtgtgaaagatgcatcaagaaaacccaagctgtgatgctgttaagggctgaaatgtgtctgctgaagtcctaaacctgcaaacgtgaccttatttggaaatagggtctttgcaaatataatcaagttaagatgaggtcatagtggattagggcgggccctcacccaataggaccagcttccttaaaagaaaaggaaaaggccaggcctggcacggtggctcacgcctgtaatcccagcactttggaaggctgaggcgggcagatcatctgaggtcaggagttcgagaccagcctgaccaacatggagaaaccccatctctactaaaaatacgaaactagccgggcatggtggcgcatgcctgtaatcccagctactcaggaaggctgaggcaggagaatcgcttgaacccaggaggcagaggttgcgttgagccaagatcgcgccactgcagtccagcctgggcaacaagagcgaaactcagtctcaaaaaaaaaaagaaaagaaaagaaaaggaaagggccagatgtggtggctcatgcctgtaatcccaactcttggggaggcagaggcaggaggatcgcttgagcccagcatgggccacatagggagaccctgtccctacaaaaagtaaaaaaattagccaggtatgatggtgcatgcttgtagtcccagctacttgggaggctgaggcaagaggatccttgagtctgggagaaggaggctacagtgagctgtgcttgtgccactgtactccagcctggcccacagagtgagatcctgtctcaagaaaaaaaaatagaaaaagaaaaagaggccgggtgcagtggctcaggcttgtaatcccagctcttcaggaggccaaggtgggcggatcacctgaggtcaggagttcgagaccagcctgggcaacatggtgaaaccctgtacctaccaaaaatacaaaaaattagtcaggcgtggtggcacacgcctgtaatcccagctacttggaaggctgaggcaggagaatcgcttaaacctgggaggtggaggctgcagtgagctgaaatggtgccactacactccagcctgggcagcagagtgagactctgtctcaaaaaaaaaaaaaaaaggaagaagaagaaagaagaggaaaaaacctggacacccgcaggggagactgtgtgaagacagaggcagaggctggagcgaggcgtctataagccaagaggcaccagggactgtggtcaacacctgcagctgaagaggcaggaggaccctcccctggagccttgggaggaagagtggccccgtccaccccgatgctgggtgtcagcctccagccctgtgacagaataaggctctaccgttttcagccactcaggccatggtcccatgtaacgcagccccaggaactcgcccaaacagcaagctcacctacagagactgcacggcaccacgctctgagtggtggcactgggggtcttcacccaggactcacatggtcccatccgccagggaccctgccttttgagtctgtagttttgaggtacactgcaaggggccctttgtagagctggacaagggcgctggggtgagagccactggcgccatccacgctgcccctgccaggtgaggcatgccttgaccacggtcctgctggaaagcacgtggcaaagccacccagaaaccagatgcaaagcccagaagccctcggtgcagcccctgcatccaagtcacggtcccctccagctgggctgcgtaaggaggtccaaccctgggtcttcgtgaggaggagagcagcgcagtgccgccccgcagtcagttctgcagagggagggtgggccaggccagtgcggacccccagggcatgttctacagcaacagtggccacagctccagccaacacctgggcactcgccatctctcctgatagttatgtattcatgtcagcatgtcaagaaaagcatcactggctggtcgcggtggctcatgcctgtcatcccaacactttaggatgccgaggcggacagatcacaaggtcaggagttcgagaccagcctggccaacatggtgaaaccccgtgtctattaaaaaaaaatgcaaaaattagccgggcatggtggcagacacctgtaatcccagctactggggaggctgaggcaggagaatcgcttgaaactggaaggcagaggttgcaaggcagaggttgcagtgagccgagatcgcgccactgcactccagcctgggtgaaagaacgaaactccagctcaaaaaaaaaaaaaaaaaagaaggccaggcgcagtggctcaagcctgtaatcccagcactttgggaggccaaggtgggcggatcacaaggtcaggagttcaagaccgcctgaccaacatggtgaaaccccgtttctactacagaatacaaaaattagccaggcgtggtggtgtgcgcctgtaatcccagctactcaggaggctgaggcaggagaatcgcttgaacccgggagatggaggtggcagtgagctgagatcgcgccactgcactccagcctgggcgacagagtgagactctgtctgagaagagaagagcatcactgagacaccaactcatgacttcctggatgcgcttccttcttaagacaaggcaaaaattaggtgaagtacaaaatgaggttgttatcaataacattaagcgaacagagagcgcacccgggatgctaatggatgctgcctgccagctttgctccctccaggagcgcatcccgaagaagacgagccagccctcaccagggtgcaggtgtgtgtctcactcagacccttcctgaccctgaatctcaggctcacccggaggcgtctgtgatcacagctctgcttcctgtgagggctctgccatgggcactcgacatggccttacacagacacagggtcccacagacgatgggacctcctaccctcccttctcccaaggtctctagcaatttccacactgaagaaagcaaaaacagcaacagtgtcccaggggccagaccagaggtaaacggattaaaacaaccacttctcggcctccctgaatgttactgcaacgtctagtgaaatccagtgagcagccgtgaaaatggctttaactagatgggatatcagagttagtgccacctcgtaactccctgcctcactccgccaacaagtaagaaaagcaactgggacgctcggagcactgacagccgctttgtcagtcacgggacacgcatttcaccgtccagcagagggtgtctgctaatgatttccgaaaagttcttcaaaacactccgaagtacagaacaagtctacatacaaactaaaataaaagcaacgaaatactatagatgtatttccatatatcaccgtaggcagcgaaacataaccatttcctcaggcaaaaacatgcaaactcccagtgtatgacgttagcaacgtataacgaagaaaagaaagcaaaagtcataaaaacagtaaacaggcacacttttttttttgtttgagacgaagtctcgctctgtcacccaggctggagtgcagtggcacgatttcggctcactgcaagctctgcctcccaggttcacgccattctcccacctcagcctcctgagtagctgggactacaggcacccgccaccacacccagctaattttgtttttttgtatttttaatagagacggggttccactatgttagccaggatggtctcgatctcctgacctcatgatccgcctgcctcggcctcccaaagtgctgggattacaggcatgagacaccgcgcctggccaatgtaaacaggcacactttttaagaagtatattatatatatatattttttttttgagacagagttttgctcttgttgcccaagctggagtgcagtggtgcaatctcggctcacacaacctccacctccccagttcaagcgattctcctgcctcagcctcccgagtagctggattacaggcgcgccaccatgcccagctaattttgaatgtttggtagagaccgggtttctccatgttggtcaggctgatctcgaactcccgacctcaggtgatccgcccacctgggccttccaaagttctgggattacaggcgtgagccaccgcgcccagcctatttattatttttttagatggagcctcacactgttgcccaggctggagtgccacagcacgatctcggctcactgcaatctctgcttcccaggttcaagcgattctcctgcctcatcctcccgaagatctgggactacaggtgtctgcccccatgcatggctaatttttttttttttttagatggagtttcgctcttgttgcccaggctagagtgcaatggtgcgatctcagctcactgcaacctccgcctcccaggttcaaaagattctcctgcctcagcctcccaagtagctgggattacaggcatgcgccatcacgcccagctaatttttgtatttttagtagagacggggtttcaccatgttggccaagatggtctcaatctcttgacctcatgatccgcccgcctcagcctcccaaagtattacaggcgtgagccactgcgcccggccttttttttttttttcagtagagacagggcttcacgatgttggccaagacaaactcctaacctcaggatccacccacctcagcctccaaagtgctgggattacaggcctgagcccctgtgcctggccattattactattattattttttattttagagagggtcttgctgtgttgcccagggtggccttaaactcctgggctcaaacgctcctcctgcctcagcctcctgagcagctgggactacaagcaggcacgcttttttttttttttctgagacggagtttccctcttgttgcccaggctggagtgcaatggtgcgctctcagctcactgcaacctccacctcccaggttcaagtgattctcctgcctcagcctcccaagtagctgggattacaggtgtgtgccaccacgcacagctaatttttttgtgtatatatttttagtataaatggggtttcaccatgtcagccaggctagtctcaaactcctgacctcaggtgatctgcccacctcggcctcccaaagtgctgggattacaggtgtaagccaccatgtctggtccaggctcacttttaataaggtgatgctaaacagaaatacttaaagtacagagtaacattaacctgaaatgtttcattcactttggaaaaaaacaacagccactgtttaggaagcaccgaggcggttttaaatatcctgactcccttagtttcccttcagaaataaaaacctttgtgatatcactaacaattctcagagcacaaggctgtcccgcagcctgccccaagcacttactcaccagaaaaacccagccagtcactcagcacactgcgagaacttacacctttaacttcccctatctaagaagctttttgcgggaaaaattaccatctgtgcttttactcaatagtgagctcttaccattaacattttagaaacatgaacacagccctgatcaagcggaaccgatacactcccgaaacaggcagaaaatcctaaacacacttgcagcaccagccagcaaagctgcactcacagcgtcgggaaccggaggtggctgggagaaccgggaataaacgacgggacacacgtccagccttcctgagttcaagcgccctgaattcacccaccagcacacccatgggggagacgggcacttttgtatgtgacacgggcccccaatgagaaaagcctggggtgctctccctagagctgacacgtgtacacgcatgcaaaacccagccctgggactgatgggctctaggccccgacaaaggagcacaggaggcctattccatttcagtacaatgggttccgtgattggccaaggctgggctcagtcctacaccagactgacagcttcctcaccctcccacgcttgggtttaaagacatgtccacaggaagatgcaccatcagtcaacggctgctgttaggagaaacaggaacagcactgaccacacggcgagcacaggacacggccaacccggcaagcacgaaaacatgagagtgaagcctacagtgagtctcggaattccagaccacgggccaggtgctatggctcacacctgtcgtcccagcactttgggaggctgaggcaggatgaatgcttgagcccaggagtttgagaccagcctgggcaacacagcgagaccctgtctgtacaaaacatgttttaaaaatggaaacaaaaagtcgggagcggtggcacacacctgtcatcctagcactttgggaagccgagacgggtggatcacttaagctcaggagttcgagaccagcctgggcaacatggacaaaccccgtctgtactaaaacttaaaaaaaaaattagctgggcatggtggcgcgcacctgtgatcccagttactcaggaggctgaggcagcaggagaatcacttgaaaccgagaggtggagattgcagtgagccaaaactgcaccactgcactccagcctgagcgacagagcgagactccacctcaaaaatacatacataaaataaaaataaaaatgggaacaaaaggccaggcacagtggctcactgtcatcccggtactttgggggttccaggtgggcagatgggggtgcactcgcgctcaggagttcaagaccagcgtgggcaacatggcaaaacctggtctctactaaaaaaagtacaaaaattagcagggtgtggtggcacacgcctataatcctagctactcaggagactgaggcacaagaatcacttgagcccaggaagcagaggttgcagtgagccaagatcacgccactgcattccagccttagcgacagagtgagaccctgtctcaaaaaaataaataaataaataagataaaataaaaataaaacaaaaataaaaaaattggccgggtgtggtggtgcgtgcttgtagtcccaggtactcaggaggcagaggtgggaggatcaccttagcccaggtcgaggccgcagtgagccatgactgtgccactgcactccagcctgggcaacagaacgaggccccttctcaaaaaaaaattaaataattcagaccagaaaaaaggacaatatccacgtcacactgcatccctgaccacacacttcccagaacaagttttctcgttgtggtgtcttccaattccttttcctctgtcctgattcctgtcctgacctttgtcctctaggaaccttgtgtgtgtgtgtgtgtgtgtgtgtgtgtgttctttgggactgctccgttttctgtttgtaaaaggaaatgtaaaccgttgaatgggctccccacaggactaacgtaaacgaccagattacacttgagaagtggagattttgagtgcagagaggaggctgtaggcgaatcaaggcttctttagagaccagaggctcagggcagggtcgctggccaaagtcctctgtttccttgaatgggtaacaagcagacacgtcccacctaagcatcagggccaccttcgaggttgagcagccggcctccctgaagcatgggaaattccgagtcttgtgggtctgcagattccacactgaaatgggaggaggaagaaatggggctggacctggacaaacaagtgccttcttcagccagtctgtcctccacccctaaaggagctgaataatctctacttctttcgaaaatacctaagctggctttgaacttgccaaataaaaggatactgccattcaccagattcaataatttaaatggcatggaaagagaacacccattttattcaaatagggccacaccaagacaagaaagactacagaccatgttgtcttgaaagctaatttagcaaatatcagaaaaactcacttggcggttgccacaaaagccctgaaccacgccctttttcctgaaagctcagggtctgcaggacaactcagaggttctaatcccacccaaaatttcacgtggccaaggaacacttaccgccttcccccacccccgttcttctgggtgctctgagaggtgatgtttccatcactgcacccccatctcaccgtcatcaaaccctccctcccccatcttcccatcactgcacccccatctcaccgtcatcaaaccctccctcccccatcttcccatcactgcacccccatctcaccgtcatcaaaccctccctcccccatcttcccatcactgcacccccgtctcaccgtcatcaaaccctccctcccccatcttcccatcactgcacccccgtctcaccgtcatcaaaccctccctcccccatcttcccatcactgcacccccgtctcaccgtcatcaaaccctccctcccccatcttcccatcactgcacccccgtctcaccgtcatcaaaccctccctcccccatcttcccatcactgcacccccgtctcaccgtcatcaaaccctccctcccccatcttcccatcactgcacccccatctcaccatcatcaaacccttcctggctgggtgcagtagctcatgcctgtaatcccagcactttgggagaccgaggcaggcggatcacttgaggtcaggagttcaagaccagcctggccaacatgatgaaaccccatctctactaaaaatacaaaaattagccgggcgtggtggcggatgcccataatcccagcttctagggaggccaaggcaggagattcgcttgaacccgggaggcagaggttgtaatgagccgagatctcgtcactgcactccagcctgggggacagaacaagactccgtctcaaaaaaaaaaaaaaaaaccctccctcccgcccaccatctcactaccatcaaacccctccctcccggcttcccagggccagttgtccccatgctgcacaaacagccctgggcactttgtgtcaacaactctgttttctggttctatccctgcacttgctgttcctccaaccagaacagccttgctccacttctcagcctctgcaaagcggctggctatggccaatgagtggattatgagtgtgtttctagaaagcctgtgtgtctggatgtgcccctccacagcccagaaatcaacaaccaggccttcgagtttcttcataactcagaagcttctaatctctgtgactttttgtgggattctttcagggaagtcagttgggaaagcggcgaatcaacactgcgacaggtaatgcttagcttgggccgacttctcgttcttctgcccagttaagagccatagttttgctccccatgccccagcagataagcaaagcctctgtccatccggcgggtgacccacactaagaagacgacttgcccagagtaacgtgggccacgcggtccaggtgtgtccacctctcacaaaggcagctgtcaacaccgggagttcctaagccctctgcacgtagcccaaggcacagcagtgcccctctccacatctccacagaggagcaccgacgcaggcctcgtgtgcagcgatatgccagcgaatgggaaggctttctgtgcaagaggcttcattttcttcattttcttcagagtggttggaagagatgatgtgatgcacttttgtaaacgaaaatgtcttacaaacaaagtatctgtgtgtcccatgcaagcagcaatgctgcccgactttcagataaatgaagacatttttagaaactgattgttcacacacatatgtggctcttttccattttgggggaaactgagaaggactgagtcgctagtaagtcagagatgctcaaagagaaaccaagaggagcccgggggcgacacctgggccgacaatgacaggcccagagaagaaatgctttggctgggcacggtggctcatgcctgtaatcccagcactttgggaggccgaggcgggtgaatcatgaggtcaggagatcgagaccatcctggctaacatggtgaaaccccatctctacttaaaaaaaaaaaaaaaattagccgggcatgttggcagacgcctgtagtcccagctactccggaggctgaggcaggagaatggggtgaacccggaaggtggagcttgcagtgagccgacatcgcgccgctgcactccagcctgcgcgacagagcgagactccctctcaaaaaaagaaatgcttcacggatgacttttccaaaaagacagcgagtgtccttgggaaggcattatgtgtgctgaaccaagtcttcagaaggtacaacgtgaaactcaactgctcctcatgcctacccccacagctgaccagctcccaaaagctgcctcctacgtacagtggccctgccctccggccagcaatccactctccgggaagcagggtttggaatatgactcgctccaccaggaccggatgactgccaggtctggaaccgtgcgggtggatctccgagtggactcccttccctcgagtcacctttgggctccggtgccactccccacagcagtccccacagcagtccacacagcagtccaggcaccctcctcccagccttgggccgtttcttgccagcctctgccagccaccacactgggtcacatcagtggtttctgcgtgcccccaacccacctccgtgggaactttgtcaccaacctggcccaaagtctggtccacagcaggccctcagtaacaccaaagagctgtcatgaataggaaaccccgagtgtctccggtaagacgcaaaagcccatctgtcaaaacacaaaagatggccgggcgcggtggctcacgcctgtaatcccagcactttgggaggccgaggcgggtggatcatgaggtcaggagatcgagaccatcctggctaacaaggtgaaaccccgtctctactaaaaatacaaaaaaattagccgggcgcggtggcgggcgcctgtagtcccagctactcgggaggctgaggcaggagaatggcgtgaacccgggaagcggagcttgcagtgagccgagattgcgccactgcagtccgcagtccggcctgggcgacagagcgagactccgtctcaaaaaaaaaaaaacaaaaaaaaaaaaccacaaaagatctgcaaatgcttttgaaaaatacactaatgtttctcaactttctattgtaaaatagctatggtagcaaatttttaatccagataatgatgtttagaagcatttaataattttaaattgtaaattagagtaaaacggcactgctgatactcaactatgcaacagaaccattcaacagaacactttgcataaatcatacttaggtcaaatttcactggtttcatttgtttttatgctttaacaggacaatgttttatttgtttatttattacttaattttattgttttagagacaaggcctcgctctgttgcccaggctggagtccagtggcacaatcatagttcattacagcctcaaactcctggcctcaagcggcccgcccgcctcagcctcccaaagcactgggattacaggcgtgagccaccacgcccagcctcagaaccacttttaggttgttaaaaaacatcctttctcttttccatctataaacaacaccattggggccctttgtcatcaccagcaaaccagaacaccaagcctgggtctgtatatgtgaggcactcaaagggtctaagtgataacagaaaagcaggaaaatccctcccatggaccccatggcctaagaccccagcactccgcacaagttcacagctacgccgcagccgcggcagacggcaagaggaccacaatcaggataaggcggcggcctctcaaagccctgaataagtctgtggccttaatagagattttgaatcaaacatttattcttaggagtcaggccattcaagcaaacttagcagcaacaagatgaatttttcccccaggggaggggacagattcaaagggtatttttttttttaaatctgctagaaaaaccagtagagggaagtatcaaccatcactcaaggtcactcatgagacttccaggtaaaacatgcaaagcccagggagaagcagcagcctgagtttttacaagaacggtacttaggcaagaacacgaagtccccaggacagggaacctaccacggcagacgccgtgacactgggtgtgcggatgggaaggggcaaggacttctagacctttcctctcactttaactcagcagtggagcgggtgcctgggcaccagtcacggcagtgggaggaaccggctccagttctcaggctgtggagccgtctaggcaccgtgcacgaagtgggtctccagggctctgagaggccgggctaagacctctgatggagaacagagcactggagctgcaccgctgtcccagaaacacaggccacagggacagagtggcccaatttcccttaatttaaaaaccccacgtcagggcagtgttggaaagttcactctgctaaaatttaattcagtgtttgtaaatagtacatcgtctgacaataacaactgtgtaccccccacggcatttcctctaaatccttggagcagtttcaccgttcacagggtttacctcctgacctctgtgaccaccaggggctggggagggacggaggacgcagggcactgggtcagcctggccctggtggaactgacctgggggcccttaggtaacagtccacccaacccgaacatccgaaacaggagtggaactcaggtctgagcacagaacgactcatcctcacacaaaacagctaaacccgaacagaaatcacctcatctaagcaaaagaaaactctcacgttcaggataatgctgtcagtgagaggcttaattaaatgcttgtccccaggctggcctgaaggcaaggcggaatttcggatttctaaacacctcaaagtgagtgcattccacgccccaaggagaaatctgacagtaactccccagccctcttccttcagttacggagaagatgtctagctttttaggggacacagtaagttcccacctaaatttgcagtaacttgtgcccaagtactcccctcactcctcagtcctttctgcagtggtaaccaggctgaggtgcccaaaagtgccagttggaaacacgtaaaacacaccgagcagaaaggttctactctgataaatactgtcgcttgcttcattattcatgtgaaaaaccccttctatacatttccttttgatgaacaaactattttccactcttgtagagtgaaatagtgccttgcagaggcagcgtgagtgccagcagcagagatgtatccagtctgttacccaaacgggaagttagctctgataatagagccaatatgaaagattctacaatcgatacaattaaaatgcccgtgagttctcggcgcacaggtgtctgcgcccaggccgcgcgctaaacacgtttctaattagcatttctttaaacaatgctgatcacaatcttgccaccgtaatccactccaaatgcatcgttgagattgcagcacggaaagcgagagaggaaattcgctgcgaatctcaaactttcttttgtttatatttcttcgctgtcagaaaatatccgttcttcgccccatctggtctgtaccctggctcctcggtccagccctattgtgtgtgcttcgttaaacctacaaacagtgaatctgtcagcggggccaggggaaccccaactagcaggagccctccctctggcgcagagaattccccgtttgccttagggattgagttgtcagacaccggctcgcgctcccccgcgaaactgacatgtctatttacagagaaacaaagacgcggctcgcagcggaccccgcttcctccgcgcgccccgtccgccccgcgcgccccgagccctccgcgccccgagccgccccgccccgaggcccctgcgccccggttcggccggcgattaagatggagaccaggccggcgcccggcgtccggggagacaatgaccccccggcctcagggcgccgggacccgcccgcgcccacctcccgcagttccgactcttggcaaactcggcgcgggcggctccgggtgcggctgggctgtgccggcggggggcgcgggcggggggcgccaagacgcccccgggctgcctcggggccaggcgttgacgcagcagaaattaccagctggaaaattcccctctcggaggtgccggggagggagcgcggcggcggcgggaggtgccgggggccgaggggccggggcagcccagccgcctccgcgctcagccccgcggggaacccgcgccgcccccgcgcgccccgccccgcgccgccggcctggggggcacccgcgggggccgggccggggtctccgccgccgcccccggagcccgcgccgcagctgggagcgccgatggcccccgggagggcgcccccgcggggcggggcgtggcggggcggccggcggcgggggcgcgcccgggctcgcagcggccccggctcccggctcccggctccgggcccggcccccgccgcgatgcgcccgcccggccgcgcggacaatgagccggcgccgcttacctgtgaccccatggggcgcgggcgagggcgggcgccgcggccgccgggccggcgccggtgatcgccgccgccgccgggagggcgctgcgtccgggcgggtccgagctgcgcgctcgccggggctgctcggtccgtccgtccgtccgtcggtccgtcaggccggcgcgcgcccccgcgcccgctccaaccccgcggcccccgccgcccgcgcgcgcgcgccccgcccgcggaccctgaccccgccccccggcgcgcgcccggccgccgctgattggcccgcgccgcgccccggccgcggccaccgccccgggccccgcccacgccggcccggccgccggccccgcccctcgctcggctcccggcgccgcgccgcggggtcgcagggggccgcgccgggggtccgttctcccccccgcgggcagccggacagcggaagtgcgggctggagctcgctgggcattgtgggaagccccctcccctgggctggcggggggctggggcggcgcggcgcgggggtccccctggcccccgctgcgcccttgccccgcgagcgcggagcagcctggaaacaccccacgggagcggcgaccccggcgagggcacccgctcccttcccgggccgcgcaccgggcgctgcccacgcgcaggttcctcgggggcgcgcgggtgcccaggtcaccggccgtccccgcgcctgacgcgcggttgcactgcgcgcgtctcgcaaacttggcgactcccccagcccggccgggcatcaacgcgggccgctcgcggtgcggaaaaggcgcccccaaggaaggccgcccggggtgcggggtctggaagggcctgggcaccgcgcgcgcctaccctcgggggcctcggcgcacccggagatcggcgcacctcgggcgcaggcctcgtgggggtgcccgccagtggggctcgcttttggctgactaggggcaccggcggccgcgcgtgggtccctcccgtcgtgttgtctgcgggggacgaatggctccgggagggggcgggaaccagcggcccgggcctcgccccagcccgtgtgcagccccgatccgaacggcctgggacgcgtctccaccactcggcgcccggactctgcgcgtcgcttctcgcctccgccgtcctcagccctcgggcgggtagagtgggaagcgcggccccgcattcctggccggcctgcgcaggggtaaaggccacctcgcttcctctccccgggcgcggcgggaagggaggtgagcctgtggccggcagccgcgcgagggagtcgagcccggcccggccaaccaatggggaggcgcccgggccgtccagcctgcctccctgcgggcccagcgcagcggattcctcgggaggtgggaggcggcggccctatgggtgctttcaaatctggatgtgtgaggcgcattcaggagcggcagtgggaggcggctgagggctctccatgagtgagcaaaggcgaagcgaggtgtggctgccgggaccaacgcctgggacactcccttactgccgtcgcgggcgcctggaaatggctgtgcggacaccccgttcccatcccctcgccaaggtcgccgggatggcactgcggcccaggaagccccgtcgccggcctacctcgcgcggcaccctctcggtggcactgcctgctctggtctgaaactgtagccccagcctcaccgaccttcgggaagtgggggctgagcacaaccaccctgagaagaggcggcttccaggagggtctggcgggtcacgtgcatcccccttggagaaaacagcactgcctgcaggagcccccacctgcccacccagagcccagttgtaccccacggaggaaaggaggcctggggagacaggagagctcgggcccaccgagccaaagcaaggaggaccagagccctgatgcctgccccaagggcctcccgcagagcctgcccatgctctcttgcgcaaaagagaaccccagtctctcccaagatgtctggacctccctagacagcctccaaggagagcagtgttgatggtttgccatgtccgttgtccatgcagggatggagagcagcagcagctgcctggcggaacacacagtggcactcagtcatcgcttaggaggcctgcccataagaaccaaaccttgatctcaccacgacccaggccaaccccacctgccaggttagggctgcctgtcttggtagaaacttgctgagggccgggcgcggtgtctcacgcctgtaatcccagcactttgggaggccgaggcaggcggatcacgaggtcaggagatcgagaccatcctggctaacacggtgaaaccccgtctctactaaaaatacaaaaaattagccaggcgtggtggcaggtgcctgtagtcccagctactcgggaggctgaggcaggagaatggcgtcaacccgggaggtggagcttgcagtgagccaagttcgtgccgctgcactccagcctgggcgacagagcaagactctgtctcaaaaaagaaaaaaaaagaaacgtgctgagttctagaatgaacggggcggatgaggctctgggccccctctcacctgggagccccactcctccccgcttccccctcggcaacactgccagtgacgggacagagactcctgacttttctgctccaagaaccaacagaaggtcaagcagcctggagacgaagacagtatgtcaaaaaggaagaaccaagaccggtctcagagacagcgccctgattaagtcctacagaccgttattccaagagctgataaaccccattactatttaaaagaaaaacaaacaaaaaccagcagcagcagctgcagcctctcagccgaactgggaggacgaggagggtggagtagttggactcctacagccacgtggagtgtctgctccgacgggcatgctggccccgtggcccaggaacctcaggtttgttggagcccagcatctactgagctgctgctgggattagacatgagacggggggatgccaggctgggccgcggtgccccctcttcctagggccccgggacacttgtgcaggtgacgcacaccaggcctgggggccacagatgcaaggagggatctgccgcctgacagccggctgggaggcagctctgggaacagagaatgtgaagtgtggcctcagcagcattgggatcagggctgggaggccagcacatgggtgtctgggagggtccagagggtggggcccctgagggtgacatgatgaactggacatggtccctgacctcgccaagtgggtgaacaagacaggtgaacaaaaggtcaggtctctgtagggcacacttgtccacgctgcattacgtggtcattcctgaaagtcacccccagccatctgggtgagcacgttgggagcctgtccaagggaccctgaggcctatgagggatgagcggcagcaggccaggagttctggaggacggggggctcagggcaaggtgcagaggctgggcagccccacggatgtacctgctgagggacgtgccccccacaaacccctgggaaaactcaaccagagacacaaatggagagccatctggctggcagggccccccgagggtcctggcacagcctcgcgcttatggcctctccgcagacctgtgttcacagactccctgcaccacttaccctgccagccggccacctgccctccaccctcactgtgtggcttctaggggatggggatctgggaggggacccagccccattccaggtgctctgacaccaccaagagagtagggatctgcctctcatcctcaggaaggatggcctgggaggagctttgggaaagaaaattcccgaggaacaagataccccttcctgtctgtgtccccacccccccccaagcagctccccaacctcgccagggcctttactgccaccccctcttctcccaaggaggcatttccttgtccacccccagctgggatttctgtggttgtctttgtctcagtcactggtcagggaacctgcctgtttattcaccagccagtggtgttgctcagtcgtccccatggcaacagccctgggagtcctgccccctcccagggaactgcccagaacctgtccctgccctctccaggcctctgctgggagcccagacagagggagaggcagagggcagggcggggagagaggcccgccaccagcctgaggatgctggggctgtccagggagccgcccaccacacgtcatcctgggtcctgcgggtggactggaggccggccgtgggctgcaggagagccccacccacgggctgggggaggtggccttgtcgaggctggatagaggtgggcctcctctcgggcttggcttggccaggtccagtgccagctggccctgccctcccacccaggcctccccaggaccaccctccagagctgctctggggccaggggctacctgccaaccccacggctgccccaccccaactgtcctccgggcctgcgcccctgccaagccccaactgccgctccagctgccacagccaactgtcgaccggtctccattccaagcgcctgctcacccccaatcgtccttccaaaatgctgctgccaactgccagccccctcccttcctgagccctggctcccaccaccactccaggccaccacaccagggatctgcattccagaccttccctgggacagaggccaggccacacctgccgtgtccctaatgggatgggatggggcgggggaggcactgcactgaaggtctgagacctgaggccccagcagacagaaggcaaggggcagggagagcgcgggcagggcaggggagagggcaggggcagggagagcgcgggcagggcaggggagagggcaggggcagggagagcgcgggcagggcaggggagagggcaggggcagggagagcgcgggcagggcaggggagagggcaggggcagggagagcgtgggcagggcaggggcaggggagagcgcgggcagggcaggggagagggcaggggcagggagagcgcgggcagggcaggggcaggggagaaggcaggggcagggagagcgcaggcagggcaggggagagggcaggggcagggagagcgcgggcagggcaggggagagggcaggggcagggagagcgtgggcagggcaggggcaggggagagcgtgggcagggcaggggcagggagagggcaggggcagggagagcgcgggcagggcaggggcaggggagaaggcaggggcagggagagcgcaggcagggcaggggagagggcaggggagagggcaggggcagggagagcgagggcaggggagggggcagggagagcgcgggcagagcaggggcagggagagcgcgggcagggcaggggagcgggcaggggcagggagagcgcgggcagggcaggggcagggagagtgcgggcagggcagggagagcgcgggcagggcaggggcaggggcaggggagaaggcagggcagcccatcctcagtgccaggggccacgtcaggcccagcgcaggggtgggaaggcaaccagagcgcagctggagcaggccctgggagctgcagggcggagctggaccttccctcagagggtctgtgaacagcttggcctaaccacagaccccgggagggtcctcccagccatgttggggggaacgggcccctccctaccagccttgcacagctcagggtggaaccagctcccaggcctcagctgtcccaggccatcctggactccctcctgcttcaccacctggcacccggggccggcctgagtccctttaagttccaacgtgtggcttctcagtcccagccctggccttgctgccccttccctccttggagctttctctctgcattcatcccagtggtccctgatccccacctccaacataggacccccctccatatcccccagcccgctagaccgtatccctcaaacacagcgggtgcctgcaagttggctcaccaggcctaggggaggcacggctgcccttgcgggtcagacctggggctgtaattccatcccaggctctggaccagccggtcagcaccaggaggtgatgggggccggggcctcagtcccggctgaagggacacagctgctccccaggggcccctggcctctgagggctcgcgttgcagaggcgggtgatggctctgcagatagccactgcaggtgaaatggacacctggctctccctggtgtcccctccaggagctgtcactgggcagtccgccttccaggatgggacatagtggagcaggcacggggggccatgtcagcctgtcagtcgggctggccctggaggaaggtttgcacctatggtgtaccaggaatctccctacttggggaacagtgaggggaaggactctccagggtcacctggtcccacctccggtgctggggcctgggaaggagagagaagggaggtggctgtggcccgtccccttccaccagaggggggctgctggggttcccttggtggatatggagaggccccagccctgcacaaggccagcctgttgcctcagcctcattcactcactcactcacttgcagggtagcattcacggatcatggcacctaccgcgtgccaggacgtgctaggtctggagagccagaaaaaaccccttgtattgcaagagtggagagtcggtgacaggtcagcaaattcataaacgagctcttctgagataaaaaggaactgggaatgggccccttggggacatggctggtgctggggcagagcaggaaaaggcaagctgagctcctggccatggtgggatgacagggggcaggagggccagagaggagaacagcagaatcatatagtgctggcttatgaccccaagctggagcgcgtgctgatataaaaaataagaacaattaaatgcaagaaagacaccaacctcccctacaaaagaattcccagtaatacctgtaggttccgagagcagagattacccctatgcacacaccatgagtgaggactgggtctagggactcctttccaaagagcggagtcaagacaggcaaagaggaacttggccgaggaggcgactggcaggcaccaccttggccaggtgaccaggtgagcgtcgccaggtgatcgcacggatgccccacagctctgataagaggtgactcaaagagcaccccacctctgtgaaatccttcccaaacccaaaacctcagtctactgctgagaaagtacatcagacaaacccaaactgaggggctttcttttgttgtggttgcttttgtttttgagacggagtctcgctctgtcgcccaggctggagtgcagtggcaagatctcggctcactgcaacctccacctcctgggttcaagtgattctcctgcctcagcctcccaagtagctgggattacagttacctgccaccacacctggctgttttttgtatttttagtagaaacggatttttagtaacaagaccatgttggccaggccgtttttgaactcctgacctcaagtgatctgcccgcctcggcctcccaaagtgctgggattacaggcatgagccactgtgcctggacacaaactgagggactttctacaaaaacaccttgtcggtgatcctcaaaggtcaccaagaacaaggaaatctgagaaactgtcagacaggagagcccgaggagacgggacagctctaaacattgtggcacctgatagggccctggagccgaagaaggccatcaatggcaggactggtagacttcaaataaagtccgttctgcgggggagataaacggaccccaacgtgggcttcctaaggcaacccagcaacacaggatggcgacgtcagggaagacagaggcttcgtgacaggtgcataggactctgtgctttgcagtgtcacacattctactggccaggctggagtgcagtggcacgatctcgattcactgcaacctccgcctcccgggttcaagcgattctcctgcctcagcctcctgagtagctgggattacaggcgcccgccaccacgcccagctaatttttgtatttttagtagagacgaggtttcaccatcttggccgtgctggtcctgaactcctgacctcttgatccacccgccttggcctcccaaaatgctgggattacaggtgtgagccgctgtgctcggccaatttttttatttttagtagacacagggtttcaccatgttggccaggttggtctcaaactcctgacctcaagtgatccaccacctcggcctcccacagtgctggcatgacaggtgtgacccaccgcacccctcctgcaatgtcgcccattttctgaaatctaaaattattccaaaataaagtttgttttttaaaaggggaaaatgcaaaaccaaacaatcaaagaaaaccaccttcttttgaccctggcgttgggagttaagcagcctctccaggcctgtctcaggcaagatgctcatttttggttttagaattcgggggttcagggtgctcctggctctgcccagcttggaagcacacacaggccacagggaccacagaacctccaagctgagtcagggtacgccccgtggaaggacggttggtccccgcgttcacacctgcgtgttacgaactgtgagccctcacactgcggaggagacctaccagaacgccgtcctgagagactttgacagagctcagcctggcatcggcctgcaggagcctcatccctaaaggtgattccagctctgtgttggtctctgctcaaggtaacaaagtgctgccaaaatgcaaagtgcaaactctatcccagtgcaaactttccacagctaaagcactttccctgttttccactcagtccttctgtgattttccatttccccagcgcctcttgggttaccccttcgttacttccccataccccttttttgctccttttctgttctccctttaaaaacctgggttggcccggtgcggtggctcacgcttgtaatcccagcactttggaaggccgaggcgggcggatcacgaggtcaggagtttgagactagcctggccaacatggtgaaaccctgtctccactaaaaaatacaaaaattagccaggtgtggtggtgggtgcctgcagtcccagctactcaggaggctgaggcaggagaatggtgtgaacctgggaggcagagctcgcaatgagccgagattgcaactgcactccagcctgggggacagagcaagactccgtctcaaaaaaaaaaaaaaaaatactgcagtctgcccccacaccgcaatctgagtaaaacctgtctttccgccttcaggtgtctgggattgggtctcattccgggtcccatgcctctgcctgagtctcagccgcgtgtctgtgctcctgccagcgtatgcttgctcatgtgtgtctgtggatggtgactgtgtctgcctgtgtgcacccatgtgtagtgggtctgtgtgcttgcttgctggtggctaaccatgtctgtgagcgtgtcatgccaactgcattgcactttctgatgtcatctgccagccacgtccagttcaggacattgggcaaaaaatggtcctgcccttcaggggcccgccctaccaagggtgagccgtgaaccaagtctcaggatcgaaggcaaggtgcccctctggagggaggtggggctctgggaagcttgggggccgtggccatggagatgcggggggatggggagtgcccagcctgagctggacagggttgggccaagccctgagcacgtgcacgaggagtacagatgaggctcagaggccttgctgggaccatgggaatgagccagtttccaacaacttgatgtcaagccagggcttctgggcttttccttgggctgaagatgctattaggactatgtttatttatttatttatttatttatttttttgagacggagtttcgctcttattgccccggccaatggcacaatctcggctcaccacaacctccgcctcccagcttcaagcgattctcctgcctcaacctcccaagtagctggaattacaggcgcccctcaccgcacccagctaaatttttttgtatttttagtagagatgaggtttcaccatgttggccaggctggtcttaaactcctgaactcaggtgatctgcccgccttggcctcccaaagtgctgggattacaggcgtgagccaccacatccagggtatttatttatttacttattttattttttgagatggagtctcgctctgttgccaggctggagtgtagtggcgcgatctcggctcattgcaacctccacctcccgggttcaagcaattctcctgcctcagcctcccgagtagctggaactatagacgtccaccaccacacccagataatttttgtatttttagtagagacagggtttcaccatgttggccaggatggtctcaatctcttgacctcatgatctgactgccttggcctcccaaagtgctgggattacaggtgtgagccactgcatccagccccttatttattttattttattttatttatttatttatttttttgagatggagtctcgctctgtcgtccaggctggagtgcagtggcacgatctcgactcactgcaagctccacctctcgggttcacaccattctcctgcctcagcctcccgagtagctgggactacaggcgcccgccacaacgcctggctaattttttgtatttttggtagagacagggtttcaccatgttagccaggatggtctcgatctcctgaccccgtgatccaccctccttggcctcgcaaagtgctgggattacaagtgtgagccaccgtgcccggcctattttttgagacaaagtctcactctgttgcccaggctggagtgcagtggcgtgacctcagctcactgtaacctccacctcctgggttcaagtgattctcatgcctcagcctcctgagtagctgggattacaggcacacatcaccatccctggcttatttttgtatttttggtagagacagggtttcaacatattggccaagctggtcttgaacctctgacctcaggtgacctgcctgcctcagcctcccaaagtactgggattacaggtgtgagccaccgcgcccggccgctattaggactttagaacgagagacagacttgatctaataatgattagtcagataaatttttaggacgtagggccgatatgccctgggattgtgcagaagtaggagatgggagagaagtcaaaggagggccaacatctcttcacagccagtgtgggtgatggcagatggttcatggtacaggaaacagaggggtgtggacatggtacccaggctggaggagagaggccagggctgcaggtgcgtcctggggggaagaggctggggaagcccccggaggaagccagagggagcagagccgtgacccccggggtgcacaggggctggggtcggggaggccgtgcagcggtgaggggacctcagagcactgcttcctcttccctgtttggggtttcagaggtcccttgtgcaggggctagggcagagccccatccttaggacacctaggccccaagtggggcttccacaagctgcttccggaggatggagatgtagcacccagtccagattatagcttgacccagggctctctccctaccttggctggggtttgggacggcagaatctgtgctctgggcttctgggtccccatcaaaatggaacaaagtgacctgcagccccagtcaggtaagactagcccattcttctcctgcacagttctggctaaagcctccacccccaagcaggtgatattccctccccagatatcccacacagctcggactctggggtccctttcagattagcacagtctgatgggagaagaaaacacccgaattgaaaatagaacgaacgcctgtaatcccagcactttgtgaggttgagcacaggagttcgagacaagcctgggcaagatggtaagtcccggtctttacaaaaaatataaaaattagctgggtgtggtggcacatgcctgtggtcccagcttcttgggaggctgaggtgggaggatcacttgaacccaggtggttgagtttgcagtgaggtgagattgcgccattgcactccagcctgggtgacagagcaagaccctgtctccaaaaaacaaaaaaaagcagaacaccacctctctctccttgctgcccatccacctgctcggatggccttggctccacctctgatctgtacctgtgcacgcctcatgaaacatgaatgccaggcctgcacaacctgcttctgttgagagaggtggccggctgagccgctgttcgtggcccgcttggccgcagcctccgtctctcccaccagtccggctgcaccacccacactgctgcccagcgtcttccccactctgggctttgcacctgcccttccctcagcctggaacagccctcctgcccgcctggtgattcccagcatccgggaagactcacctccagccccagctccaggccatcatgatatagccctcccctcctgcctgaggatcccacaggcccagaccccagccctgcctgcactttctctctatccttccccttccccttaaaaatatcccggggcctctggaagtggaaggggtgggatggaggaaagagagcaggaggcatcctggctgcccagccgagggctgattccccaggtcccatgccagtgccaaccagcctggctccagcacggtgagccccacatctgcagccccacctgtgtggcttgtgtgtgcccctgagtcctgagggctctgaatctgtcctggctagaactggagttaccacccgctgtggggcggggcgagtctcccgctgctctgagcaccaggctgcaccagggaacccacctcatggagcaaagctgcagaaacactgcctttctcgtgggcgttgttaccctaagtgggtcggcaactgcaaggtggacggtggggcgggcgccgagggccgctccctggctgtgggctgtgctcgcacgtcttggatgccctgtgggtacttcctttctgttgggatttgggctcaggtttatcgctggctgcttctgggaaccctgggggctaaaggaccctgcaagacggctgggttggaggaaaggggcttgcctggtcctgggagctgggcagatacgtgggtggtgagcaaaaattgggagggcttctcatctgggccccccgcccctgagggaccatcatggtacagaatcagggagcatcaaagggaaaacctaggatgagggactggagggggactggggacttggccaaggcctgggtgagggggtgccctgcccaggggtggggctgcaggaaggagcggccattccacctgagttggccgcccctgcctcatagcccccagacccagggtgctcagagctcccctcttctttcggagccttgcgggaggccctgctgctcaggggctggtggacaccaccaagagttgggttctgtagcccccactgccacaggctgggcgggctctggcccctcctcccttggggggtcctggtgccggggtggttttgaaaaccagagactggaggccttatcagaccacaggttttcctgaggaaggaagggtgggtgtgggcctccaggatgggcgcctcctctgggtgtgcccagcctggtggagggcacacatgcactgcccatccctcctgggggaccccagtccaaggccctgccccaccagagacaagcagactgcaaaggctggacccagtagcgtgtgggtccagggctcaggcccagggtggggtgtgaactccctgaaatcacagcagatgccagcatcctccgggatagtgtgcctggctcccccagccgaggctcagaggaatttgcagccagttcacgggcagttccactccgagggatatgtccagtgggaatctatacttgggcaccaaaaaacaagcaagaatgttccaaacgacccttttcataatagccccaacctggaaaacccaaatgcccatcagtgctgggtgtggcctgtcatccaggggacagtgactgtagccaggaggagccaccttcaacgccaggcaccacctggcttccaccatggcccctgcttcagacaacgggaagcagaggccagaagcacaggcagagctggtgcccagcacggattaggttcgggaacaggcaggaccagtgcaggtggatggggtccatgaatgatggcctctggggcattggccagcagtgccttaggggccacctgggtttggcaatgtcctgttttcttgatccaggtgctggtgacaagaggcattcagtctatgggaattcaggaagccacatacttaggatgagtatgtttttctgcatgtatgtgatacttctgtgatgcttttctgcctgtatgtgaaacttcaataaaaagtttcacacacaagccaggcgcggtggctcacgcctgtaatcccagcacttcgggaggccgaggtgggtggatcaccagggtcaggagaccaaaaccattctggctaacacggtgaaaccccgtctctaccaaaatataaaaaaattagccgggtgtggtggcgggcgcttgtagtcccagctactggggaggctgaggcaggagaatggcataaacccaggaggcggagcttgcagtgagacgagatcgcgccactgcactccagcctgggcaacagagcgagactccgtctcaaaaaaaaaaaaaaaagtttcacacacaggcctggcgcggtggctcacaccagtaatcccagcactttgggaggcagaggtgggcggatcacaaggtcaggagttcaagaccagcctgaccaacatggtgaaactctgtctctactaaaaatacaaaaattagccgggcgtggtggcgcacatctgtagtcccagctacttgggaggctgaggcaggagaattgcttgaacccagaaggtggaggttgcagtgagctgagattgtgccactgcactccagcctgggcgacagagtgagaggcgtctcaaaaaaaaaaaaaaaaaaaaagttacacacacaagcagaaaccctcccctgacccctccagagggaggagcattcattccctgaggcccctgccttcctcctgccctgtcccatctgggcccctaagatgaccttgctccctccagggaagtcgcagggcggactgggctgaaagccagggagagactgccgggtcatggccccaacccttcgtggagggaacgcagaggaggcggcaggagagagcagcccctgagggaggtgcgggtggggctgggctcagagcagggcagccaggctgacgccccggggcccgctctgcctttcttggaagagtctggaggagccatgtggggtgggggtgtcccacagccgtgcaggtggggctgcggatgtgggggctcaccctgctggagccgggccggcgggccggggagcactggctcgggacctggggaacccgccctccgctggacagccaggatgcctcctgctctcctccctccatcccaacccttcacttccagaggccccgggctatttttaacttggcttagcagccggagccgaaggtggacccagccctgcagggagtggggaggagggaggagctgcagctgccgtcccgcccccacccctcccagggttcaggctttctagttgggtgggttgggggtgctggtcattcttgaccttagaggagaaacatcattcattccactctgcaaatatagtcacactcagaggccacacagatactccaagattcagacacaagcctgagacacaaactcaaaaacacacctgggggtacacccaggctcactctgtcacacacacaccgagacacacacacacacacaaacactgacacacacagacacacacacgcagagacacacacagacactgacacacacacagagacacacagacactgacacacacagacacacacatagacactaacacagacacagagacacacacatgcagagacacacacacagacactgacacacacagacacacagacactgacacacacacatgcagagacacacagacacacactgacacacagagacacacacacagacgctgacacacacagacactaacacacatagacactgacacacacaagcagagacacacacacagacacacacactgacacagagacacacactgacatacacagagacacacacacactctgcctagggacagctgaggagtgtgtgagactcaaggaccctcaggacacaagggcagatgtgtgtggacgctgtgggcagacctcaccagatgcctggagactcaaacaccctgaaggcgagccccaccccttcatggacacacacaggcacagatgcccagagaccaccagctgtggggcttgtggggagggtcggaccctccggtcacacccggaggccgaggtgggggaagcttgggggtggagctgcccatgctgcctgctctgccccttcccccagcaccagcccaatgtccctgaatccccctgaagtggacggacaagctccaggggtctccacacccttcccaccaaagggcgggcttgtgaagggcgggcttgtggcctcccctttcccccatgctcgcccccacactctcagggcaggaagccccaggagaggatggctgcaggggaggcagcggagagctgacctcagaatgtgctcagcccggccccttcctttccctgctccccacttcccctctcctcccccagcctttgttccgtggagcaactgccccctgacccccgctgagggaattggagtcagtcctggaaaaaaaccccaggtgctggctggggccactgcctccggatccagcgagaggagggagctgggggctgggagaattggggctcaggtgccagggtgaggggcaggggctagcttccacctcacaccccacctccaccccaggaggcccagggcagctcctagaggaatgcggagggcaggggaggggacaggacatcctctcggcaggacacaggacgcccagtccggaggttcccagccccgggcaaggccacgggggaaagggtcactggggcctggggctcaccagttccaccctcagccagcagtgtccacagacagtccaggtcacctccagtgggggctggaggtgttggcggatgaggcctgtcatggccggagtggaatggccgcccccgcccccaggggccccacgtgtgtgggaggcaccggcaggcctgggtttgtcctcagctctgcaaatcttggggtcgccacctccaggagaggcctcaggctggccctggccctcccaggcccaggacaggaagcccagggacagtcgatggggtgacagccatggggaccccagctcctgggggctgagcagcagtagaacccgacctctgctcactgccctggaagatgagggaccctggaggggcctgaaggcactagaaggagaaagacctcctgcgctcacctcaccggttcagccaggacccaggagaccctgccggtctgggaggcctggagggttccacccctgctcccacatgatctcctggctgcaacttcttgcccaacacgccagctggctggtcatctgtgagcgcttctgccagagtctgtcccaatcacctgagcagcaaatgatgctaaatgtcatctaaaagcagcctttcaaacgaatgaccaaaggccgggcgcggcggctcacaccttaattcccgcacttcgggaggccgaagtgggtggatcacctgaggtcaggagttcgagaccagcctgcccaacatggtgaaacccccgtctcaactataaatacaaaaaaaaattagccggtgtggtgccgcgcacctgtaatcccagctactcaggaggctgaggcaggagaattgcttgaacccgggaggcggagcttgcagtgagccgagatcacaccactgcactccagcctgggtggcagagcaaggctccgtctcaaaaaaaaaaaaaaaaaaaaagaatgacctcaacacagaccttgagtgtcaatttgcctctgtttccctaggagttaaaattaccagaggggatcgtgggcacagtcaccatttgacccaggatttctgctccccgcatccaaacaacaggaatgcttgccccgaagtgaggtgctccagatgacacctctgccagggacgccgtctccttcctccgccacctctcccgttgtgttttttgaggttcgactcaaaatctttacatgtttttaaaaattgagttttgccgggcgcggtggctcacgcctgtcatcccagcactttgggaggccgaggcaggcggatcacaaggtcaggaggtcgagaccatcctggctaacatggtgaaaccccgtctctactaaaaatacaaaaaattagccgggcgtggtggtgggcgcctgtagtcccagctactagggaggctgaggcaggagaatggcgggaacccgggaggcagagcttgcggtgagtcgagatcgcgccactgcactccagcctgggcggcagagcgagactccgtctcaaaaataaaaataaaaataaaaataaataaaataaaaataaaaattgagttttattgaagcataattttacatacaacgatatttaccaattttaagcatcctacttgaagagcctggacaaagggaaagcaggaaaccacctccgctgccgccgggtcccctgccccgccaaccaaccacgcatctgccacctccgctgccgccgggtcccctgccccgccgaccgaccacgcatctgccacctccgctgccgccgggtcccctgccccgccgaccgaccacgcatctgctttctgtaaggatagtttggcctttgctaggatttcacgtaaaggaggccctaagcacgtggtcttttgtgtgtggcttctctcacttagcatcctgtttttgggattcaccccgtagcggcggccttgtcttcccaccgtagggatgagccactgttcgcttatccactcgccagctgatggatacttggttttctcagctttgcgaacgctgctgctacaaaggtttgaggcgagtcttcctgcggacgtgtttcatctcttctgggtaaatacctgggcgcgggatgctgagtcacgctacgtctcctttcctgaatctctttttttttttttctttgagacggagtctctctctgtcgcccaggctggagtgcagtggcgcgatctgggctcactgcaacctcctcctcccgggttcaagcaattctcctgcctcagcctcccgagtagctgggactacaggcgcccgccaccacgcccggctaattttttgtatttttagtagagatggggtttcaccgtgttagccaggatggtctcgatctcctgacctcgtgatccgcccgcctcggcctcccaaagtgctgggattacaggcgtgagccaccgcacccggcctgaatctctttatatgttttggtcaccccatgactgcatccctaagagcaaggaccttgcctgtgctgcttgctgcagtgaccagagctcaacacgactgctcgcctggaggatcttctgaacagacactcacccactgggtgaatgggtggatggcagcggtgccaggacagtgggtcctggtgatgccaatggggaggtgacgatgggctggaggcaccacagaagatgccaacggtgactgcggtaaatgaggtggcagcgaccgcggccgtcagcagtgatgcagccgtgggtggatggtcgtaatggggaagacctcacatagcctggagacgcctgcttcagccctccttgaaactgaactcacctggggagatgtcatgtggcccctccacttccccctacttcaggcacccatgctcactcacaccttggagccagctgtcaccaaaacccacgcactctgaaatgactacttgcagtttccccctctgtggtgcaactgcccccctccccggctgttacacctcaccaagcgcttcgctccaggacaaccctcctttctccaaaacaggcggccttcccctttctttggcttccttcttatccagttcagattttgtggtccactcttagtcactctctcgaaaatgtgggaagtcttcaaatgtccctccttttgtggcacccttctgagaacttcagccttgccagcacctaaaccactgcccattgtagggaaaatcaagccaggaagatgggggccacccaaaacccatgtctggacgttctgctgcacccggtcctggggagtccacacctggcaaacggagacgtctatccactcagtccccacccgctgcacgccgtggtctttcccaagcactccggacttagtctctggatggtttgtatgttaagctgttccctgctctccagccttcccaccagcatttaccacccattacctcgctgacatgcagacaggagctgagaaatgtttagctgagaaattttcaggagcttcttagaagtggcttcctttcagccgggcacggtggcgcacgcctgtaatcccagcactttgggaggctgaggtgggcggatcacgaggtcaagagattgagaccagcctggccaacatggtgaaaccccatctctactaaaaatacgaaaattaggccgggcacggtagctcacacctgtaatctcagaactttgggaggccgaggtgggcggatcacaaggtcaggagttcaagaccagcctgaccaacatgctgaaatcccgtctctactaaagatataaaaattagctgggtgtggtggcgtgtgcctgtaatcctagctactggggaggctgaggcaggagaatcatttgaaccctggaggtggaggttgtggtaagccgagatcgcgccactgcattccagcctgggtgacagggcgagactacatctcaaaaaaaaaaaaaaaaaaaatacaaaaattacccgggcgtggtggcacacgcctgtattcccagccactcaggaggctgaggcaggagaagcacttaaacgagggagacagaggttgcagtgagccgagatggcgcccctgcactccagcctggtgacagagcgagactccgtctcaaaaaaaaaaaaaaaaaaaaaaattggcttcctttccaactccttgcaccagtttgcaaagccctacccatctccccactccccatccctagcctcattcctcctggtccctaaggtcccagccactctggcctctgttcttattccttcagcactagggcctctcccagggtcagccccaactccacagcctaattcacagggtgaattcctacccatctctctggtctcagctcctgatccacctcccctccaggatggcagctgctggtgtttgcttcctgcaaaacccttcttggccgggcgcagtgactcatttctataatcccagcactttgggaggctgaggtgggcagatcacctgaggtcaggagttcgagactagcctgaccaacatggtaaaaccctgtctttactaaaaatacaaaaattaggctgggtgtggtggctcacacttgtaatcccagcactttgggaggccaaggtgggtggatcacctgacgtcaggagtttgagaccagcctgggcaaccatggccaacatggtgaaaccccgtctctaccaaaaatacaaaaattaggccaggcatattggctcatggctgtaatcccaacactttgggaggctgaggtgggagaatcacctgaggtcaggagttggtggcacgagtctgtaatctcagctactcgggaggctgaagcaggaggattgcttgaacccaggaggcagaggttgcagtgagcggagatcgcgccactgcactccagcctgggcaacagaacaaactctgtctcaaaataaataaataaataaaattaaaacataaaataggccaggctcagtggctcatgcctgtaatcccagcacttttggaggccgaggtgggtggatcacctgaggtcaggagtttgagaccatcctggccaacatggtgaaaccccgtgtctactaaacatacaaaaattacccgggcatggtgaggggcgcctgtagtcccagctacttgggaggctgaggcaggagaatggcttgaaaccgggaggcggagcttgcagtgagccgagatggcgccactgcacaccagtctgggcgacagagcgagattccgtctcaaataaataaataaataataaaaataaaataaaataaaacccctctttgggttaaatccctacttgctcacagcaaataccctgagggcaaggatgggaccggccagtgcttcgtccagcccagcaggcccgtgacatacgtccgccgaatgaatgattcccgttagggatggtaaagggggaaggtggggagatcaggtcatcaccagatgcagagaatgactgaggtagggagaactgccttcatcctgccctcctggtatccatggtgggagaccacccaggcccagaaggacatcagctggtggaaggggaagcccacctggaatgtgacaggctccagccgccttcaccctcctggtcccggcctccactcaggtgagccaccctcaccctcctgctccccgtctccactcaggtcatccaccctcaccctcctggtccctgtctccactcaggtcatccaacctcaccctcctggtcccggcctccactcaggtcagccaccctcaccctcctggtccctgtctccactcaggtcatccaccctcaccctcctggtccctgtctccactcaggtcatccaccctcaccctcctggtccctgtctccactcaggtcagccaccctcaccctccactcaggtcagcactgcctgggactttccagggggctgagcggctgaccaggagcctttgctggggcggcctgggcacccgggcacttcctgcaaggcctccctccttgcagccccagctcctggcctgctccttcctcctccgccccaggggctttccacaaagcctgaggcctgctatttttagctgagggagagggcccagttcctggccccactgccgccctgaaggagcctgggctaaactggggctggggttgggtctaggggttgggggagaggctgcagtccccagcccaggcacacctggagtgcagaggggacgctgcaggctgggctcccagcccagttggtggaccaggcgcttaccctggggaggtggggcttagggcctgggtgggctgccgcccacttcctgtggccgcaccccagtacttcaaaggctgctggccgccctgtggtcagtccaggctcccacgcagctggaggggctgggcgggcacacgcacccctggcagctggccccccctcccctcagggcagcttcaaagcagcaggggtgggcagcccccgtgattagcacggatcccagggctgggacgggagacacaaggcggtaatggaggccctggcagagcccctcctctgctcctatgctgcccgtcccactgccttcctgggttggctcagggcaaaggcccaggtaccttcctggcccccagatcctgtcttgaggcaggggccacctttaggggtacctgcgtctctgcttggtgcctgtgggtttcggtggcctggccacggagtcagtcccagtcagagaagcgacaggaaccgtggtgggggcacccctgcgggacccctcgggacagcctctctttcttactcctttcctctcttccttcctccccactttccaactggaaggggggcgggaggggaggggccataaaggagaaggggctccttgtccaggcctcgggctgtggtgggcttgacctggcgccagctccccagggacggcctgggcggaggtattgggggcggggacctagaagcagccgccccagagtccggcagacgctgagaacagagagtgcctggggggcggggggcagctttcagggtcccctggggtcagctctgggacagttgccgtttttaatctgcacaagtgatttagaaggagccgccagggctgcaacctagatccactcagacccagctcgggaagtgcggggaggcgcggcccaagaactgtgccctccccccagctgtggccacagggcagcggggaccctggatgaagcttccaccacccagctgtggccacagggcagtgggggccccggacgaagcttcctccccgagctgtggccgcagggcagtggggaccccggacgaagcttcctcctctcctgccagccagaacccgggttcatggtgaccttgcatgcccgaagtctgtccatcctgtcccggactggctctcctctcccctcccctcccctcctcctctactctcaggcatccagggaccgccgcccagcccagcttcagggccggaggctcccccagatctagggccttgaaggagccccggtccctgagctcacagcacagacgcccggaccctggcagatgccggctttcagcccacccacccggcagctgggagccacccaccccaggaaggaagggctgggggtgggctgcgcatccagctcgccggggtccccaccaaggaccttgacttggctgccagcgaccaccccacccctgctgacacaagctgggcgcgcctccctcggtctttgggcgcagggagggagggctgggtctccagtccttctgaccactccgctgcctgcttgcggcccgtccccaccacccaccacccgagctgcaggtgcggtggagacggggaggggagaaggtgcaggggcacacgggccgtcgccctgagggattttcgatggttccacgacttgggggagccaggaaaaaggggcaacttctgtggcctcccgtggacttgggacccctggtggagtcggaatcctcacgagagactcctgtggggaaacacatcctaggccctctgggctgggcccctggtccacctgggacgcaggctggagaggccaaatgcaggggccaggaagcaccaaactggctcttaggccaagagccaagggacccccaccctttccatgtgtcccccaatccaggcccagcgtcatcccccctcctcacccacacccggggctgactgtccgagatacaggctgtgttttccatctggtcaccacgcgcccccccaggtgagggtctccgaggggcaacgcgtgaaaagccggagcggatcgcctcacggggcggaatggctgctggtgccggcctggtcagaggccgggatcggtatttgctgaatatacaacacagagggaccaataaaaatacagagaaaagcacggagccgccggcgtggcagaagagcctgcggagaagctccctcaaagactggcaggcgacacaaccacaacctgtggaaaagcaactggggcaaagctcttggctttaagaatacccccttggggccgggcgcggtggctcacgcctgtaataccaacactttgggaggccaaggtgggcagatcacgaggtcaggagctcgagaccatcctggctaacacggtgaaaccccgtctgtactaacaatacaaaaaatcagccgggcgtggtggcgggcgcctgtagtcccagctacttgggaggctgaggcaggagaatggcgtgaacccgggaggcggagcttgcagtgagctgagaacatgccactgcactccagcctgggcgacagagcgagactccgtctcaaaaaaaaaaagaaaagaaaagaagaaaagaaaagcccctagaggccagggtccttgaacaaaagtgcgcgatgccctgtgtctgcagcggggagaggtctggagcccgtgtgtccgacagcagaagtggacacagtggtgccagggcaggaaccctgggggcatttgcaggcctgtgctgcgagactgcagtggcgctcaggacacacctcggagaagagcaagcctgctgcagagtgacatgaacaccaggtctgtttctgtacgagccagtgacagaagacccctagataagactctctgtacgtatatgtttgtaggcaaatggaaggtgagaaagacacggtcccgactagcaagtctggatgtctacgaggagtgtgggaagaacggttaatcgcttcacatccctgcgtcactgtgtatgatgagaatgttacatttcgaataacaaaaatgagcacttatatcaaaaactggttattgcagtgagagaaaggaccctgctctagggtcttccaagccggggtgagcctgggccttgaacatacccttcaaagtgtgtgtatggggcccaggggacgatctaccatttctgcactggagtctgcagaaatggtgcagactgccccagaagaattcagcctacatcacacaggccagcaggacttttttttttttttagtgcagcagtgcgatcatagctgactgcagccttgaactcctggcctgaagcaatcctcccgcttcagtcacccaagtggttggaactgtaggctcgacccaccaggcctggcccctgcagggctcttgaccccaacccagactttaccttgatgtggggagctgtccccactccctcccctgacaatgcagggcactgtgtcaaggattctggagagaccctggctcattcccacaggagacggggaacaggcctggggaggagccaaatgccagtgtcggggggccggaggctgcagtggcagtgcttgtaggcagggaggacagtgagccctccacatatacatagcatggcccccaggggtgtgtactgggatgggtgttggggggtactctggggagggctgctcactggtgtccttcatcccgggcaggagagaggcccagagcacaggccctgcagggagccaggacggagaaggctccagtgtacgccactcccccaccaaccccaccgtccttgagggctctgagcaattaattctctgtgactccagatgttcagcagctgtcttggccatttccgccccttctcctgaccctgcgtcctccaggaagcatcccctcctgtccttgggctccaagccacccccaccttccctgcaccccatttcctgagcagaggcgtttgtgcagactcagctcccgcacccaccagggtagcctcagttttcccaaggcctgggcactgctccctgagtccagggctgctggggtcggctcactccctgacggatgccctctgccaggggctctgatcctggttcctgcccctccggcctctgggactggttttctctctctcctctccttccttctccaaggttggctctgcaggctccactggcataaatcaagggcctccagggagggttcagtgcaggagggttggcaggactggccagggggagagccctgccccagtgcaggagggcccaatgcaggagggtgggaaccaaggggtggagggctcagagactggcaggccctgtgggggtgggtgcacgctcagatgtcggcgtggagggcaccggggtggaggtgggggttgcctccacaaacagatcagcagggacacagcccccacctccaccttgtggacacttccctgagctgatggcggtggaggcacaagaggtcatggctgctgcagctggtcgtctgggggctcttctggagaggggacagctcccttcctgtcacatgctttcctgtctcaacagagccgggggttctggggcacttggactcccgtgggctggtgggatcaggggctgggccagacacaggatgaggcatggaacccctgggggccagcggctccagcccgctgacctctgcccctcagaatccggtcccaggctctcccctcctcctctcaagaacttcctgctctgtgtgtgtgtgtgggtgggttgttgtgggggaagctaagggcaggtgggcctggctaaagaaaagcctgcatttccaaacaagtcccagagcagatcaagctgggagactgcccccaggaggacgaggctcctccaagcaggatctgctcaggggaatcaaaataaggtttagtgcgtccaacatcctgcgtggacagtcctccaggactcctgccgctgccaggatctgaactgaggtggcagggacacctcctgtcagaacttcggctctgctgctgggttcactcctgtggtctcacacaaaatgggccggtagcctttgggcccacagccccaacctgcctagagtaggcagccgctgagtttatgaaagaggctcctgggaaaggaatcatctcccaccctctgcagaagtttccatccccacccctatccaccaggctcctttccccacagggtcaggggtggacacttgagcaggaccagaaccaccaatccccaggggaagccttgcccatcccttggctgcaggggcagtaccctgtgtgtttcctcctggggcagggctcctgttgctgcccaggacccagtggaaaggatggtgtgacaggtgcaccagtggaccctgagacaccctctttgtcctcaggctttgaccaatgagcacagtagccaatcggagatcaaagctggataaccaggaaaatctggatctcaactgtgtgtgtgcctgggggtaggactgccagatttagcaaaacaaaaacaaatttaaaaacagggtatatctagaccgggtgcggtggctcctgcctgtaatcccagcactttgggaggccaaagcgggtgatccacctgaggtcaggagttagaggccagcctgaccaacgtggtgaaaccccatctctactaaaagtacaaaaagttagccgggcatggtggcgggcacctgtaatcccagctacttgggaggctgaggcaggagaattgcttgaacacccaggaggcagaggttgcagtgagctgagattgcaccattgcactccagcctgggcgacaagagtgagactccgtctcaaaaacaaacaaacaaacaaacagaaaaaacaggatatccagttaaatttgaatttcagataaacaattttaaaataatgtctcaagcagaagttggaacatacttatacccaaaaagtatttgtttatttgtaattccaatttaactggcatattattctgtattttatctggcaacctagaatgggggtaatagccccccaaatcgctccctttgttaattggtccctgtcttctgtcccccaacccctaaaggcagcagctgactcccccaactaggggcggggcctgttagggtcaggcagtgcctctaacccagacgctgagcaggagagcagagagggggtgcttcagcctgaaactaccccttccccagaaggctggggtcccaggcgggcctggcacctgggctcagaggctctggctggatttgccaaactccctgattgtagcatgtttgtttctggtctggggagctgttgagtacctggagctgccctcttccctggggctcctcctggcaggcggcttccgaccctgccctcaggtgggctggccctttccagggcaggagaaaagatacctctccagaaaagagggaggcgcagcctgggagtgggggctcgacccaggagcgagaaagaggaaccccagccaggcaggacccgccccagaaggtcactgctgttgctggcagccagtgaaaagaggatccagaaaaggagagggcttgtttctggtcagcaccgaagaaggaaggtgtggagaggaggggccgggccgagagcaaataccgcctttttggtgcagcagcagccctgtctctgaccccggccgtcctggggagatgaggtttaaaccagcagaccctgaagggaaacttgcaggacccacagcaagcctggtacaggcggaggaggccttgctgtccctttttggcccgtggggctgtccatcttaaatttaaggaagagggaggcggggtgcagggactcacacctgtaatcccaacactgtgggaggtggaggcggggtgcagggactcacacctgtaatcccaacactgtgggaggtggaggcgggaggatcgcttgagcccaggggttcaagaccagcctaggcagcatagtgagaccccatctcaatttaataaataaataaggaagaaagagggagacagtagctgctcaaatcatgggtgggaaagctgggcctgggagcgtttagctggtggggtcttggcgaaggcgggggacgggcagaaccttgggttcatcatctctgggaaccctttgtgcacccatcacctagcaacaggatgcagccttccctccgccctggaaggccaggtcacaaaggccatcagggcttgtccgggagccggtatcccctaagactgccctgtgcctctcgcggcgatcccggcccagcggctgggcgttagggccaccgctcatgtgcgtcatctgcttcgtgaaggcgctggtgcgcgtgttcaagatctacctgaccgccagctacacctacccattccgcggctggcccgtggccttccgctgggatgacgtgcgcgccgtgggccggagcagcagccaccgggcgctgacctgcgcggcagccgcggcgggcgtgtggttgctgcgggacgagacgctgggcggggatgcgctggggcggcctccacgtggggcgcgcagccaggcgcagtgcctcttgcagcagctccgcgagctgcccggccagctcgctagctacgcgctggcccactcgctgggccgctggctcgtgtaccccggctccgtgtccctgatgacgcgcgcgctgctgccgctgctgcagcagggccaagagcgcctcgtggagcgctaccacggccggcgcgccaagctggtggcctgtgacggcaacgagatcgacactatgttcatggaccgccgccagcacccgggcagccacgtgcacgggccgcgcctcgtcatctgctgcgaaggcaacgcgggcttctacgagatgggctgtctgtctgcaccgctcgaggccggctactccgtgctgggctggaaccaccccggcttcggcagcagcactggcgtgcccttccctcagcacgacgccaacgccatggacgtggtggtcgagtacgcactgcaccgcctgcacttcccgcccgcgcacctggtggtctacggctggtctgttggcggcttcacggccacctgggccaccatgacctacccggagctgggtgcactggtgctggacgccaccttcgacgaccttgtgccgctggcgctgaaggtcatgccccacagttggaaggggctggtggtgcgcaccgtgcgcgagcacttcaacctcaacgtggccgagcagctgtgctgctacccggggccggtgctgctgctccgacgcacgcaggatgacgtggtcagcacttcgggccgcctgcgccccctgtcacctggtgacgtggagggcaaccggggcaatgagctgctgctgcgcctgctggagcaccgctaccccgtcgtgatggcgcgagagggccgcgccgtcgtcacccgctggctgcgcgctggcagcttggcgcaggaggccgccttctatgcacgctaccgcgtggacgaggactggtgcctggcgctgctgcgctcctaccgtgcacgctgcgaagaggagctggagggcgaggaggccctggggccacacggacccgccttcccatggctggtgggccagggcctgagctcgcggcggcgccggcgcctcgcactgttcctggctcggaagcacctcaagaacgtggaggcgactcacttcagccctctggagcctgaggagtttcagttgccctggcggctgtaacctatatgccccagtgggggatcacgcacttgaactcctggccttcttggttcacctccccataccgccaaccattgcagggggccggcgccgacgcggggcggggcgggggggggcgcgcggggtgctcctgatctgctgtctgggggagggtaggcagaacacggggacttggtgctctccttccttcacaggggcgttctgaccgtcctcccattcttcctagctctgtcccctcctttctctcttcctcctacaaatacttttggctgcccccacccagctcctaagggaatgaaaggttaacctgacccggtttatggcaatactgtgtgatgggtgccttgatcaccacaaaaggatgatgggaacggggctgtggggtcccagggaggagcccttcacctggcctgggttacaggatggctcctgggaagacaatgccagctgtgcgctgaaagtctgtgcaagctgctcccgtgaaaaggaggacattggcatggcagggctgtgggcaggtcttagtggctggacattcccaggagttagcactggctatcattctgtagggctccctcccacctccaaactcctggcttctacaccagggcattcacagacagattgcagactcacatggtggcatgtgaggctacagatacacttgcacaggccagaggatactactgcgtgtcccctggagccaggcctgggctggactttgttcctggcttagggatgcaacacagaatgggacaaggcctctgctcacaatggtctgtaatgtcacatctctgtggtctgccctgaactgcctgaagcagggactattgtccctacatgtccctagtccccgggctggcctggttgggttgagcaagaatctctggaaagaatgaaaggcagcaaatggagaaaacattactgagagcacgagagcaggctaaggccgtggtggtaagggactcgggcctgtgcaagagtaccaggaagacacctgtgggaggaggtggccgggtgaaggaaggggcagtgggaggagcttccatgcctagggaccagtaccaccccaggctggaagcccagagtggagtcctaggacatcagatcctaaagggcttgaataccgtttaaggcttttcttccgggagcaagtaggagccaaagaagggaagttgcgggacttgttttcgtggggccagttgcctggtggttacgcgcctctcctctgaagtcaggcatcctgttccagagtatcctggttgcgcttcaacttgcggagtgacctggggcaagtgactttaacctcagcttcctcatctgtggagtggggagggcgcagcgctggtcgccctgaacaggaagtgagacaacctcggggtgcacacgcgcaggcccgagccgcagggtccacgcccgaggcgaggcggcagcggcgcctgcagggcgaggggacgaatcgcgatctttttcagagtaacccgcgtacaataaaaagtccccatgaaaaggacaaactagccaggcgtgaggggcggtggctcacgcctgtaatcccagcactttaggaggccgaggcgggtggatcacctaaggtcaggagttctagaccagcctggccaaggtggcgaaacccccgtctctactacaaatacgaaaattagccggacgtgttggcgcgcgcctgtaattccagctactcgggaggctgaggctggagaatcgcttgaacccggagggcagagattggagtgagctgagatcgcgccatggcactccagcctgggcaacaagagtgaaactccgtctcaaaaacaaacaaaaaaggaccaactaaaaaaagaatataaatacaataaataacaggacttacgggggcaggctgacccctaaagtaaggggtcgggctggaaaggatctcaaggggtcagagtttgagccgccgaggcgcgcgagccccagcactcctaggcagctgcatccgccccggaagatcccctggggccctgcgctggctttccacagcgccatgttggacggtcctcccacttcccaccttcccagtcctcccgctactctgaccgttctacctgtgattctcgctggtggagtcaacctggaatggattcccgccgaaccacgcctccctttcctggttcgcccgcagtttcggcctatcaggttgagtcgggtaaaccaggacgggccaagcggcactctcattggatatcactggtgggggcgggaagaaggcggagcacgtgcccgggcggaagtagccgtcgcatcgcggattacgaaacgccgcggagctgaggcagttccgctggctagtgtgtacgcggcgagcttctcccggcgccgcccgctcggctcccatagcgcccgcgacagcggtccggacgccgcccgaacatggactccgccggccaaggtacctgccgggcccggccccttcgccgcagatgggcccaggctgcccgttgttctccgtctcccggggtcgcgtctgcgactctctgtcctctcggtctcggttcacccaccccgcggcccctcttcagctcccggggccactgacctcgaagcttatgatggtcgtggtgtgttttttgcccgcggcccagaccgcttcctgggctctctccagccgccctcctggtctcccctgggaccgttccgaggtgtggttccctggcgcccgccgttgctcccgtagtttgggttctgtcgctcccagcaggtctcgcttatgccgcccaccccgtgccctgctcttgcttgctctgccaccccccggtccctgcgcggggccctcgggttcacgctgtctggccctggacccagtccgaggtgttgagggcggctcccgagcagagaaggggtcttcgcgttcagcagagctccccttgggcagcaactctgctcggagctcagcctgcttaggggttgcctcatggagagggggtggagtgagtcaggggcacacccagcataccaggcctgtttccagaacagtctccccagagcagtatgagatggccactgaggggcgtggagcgagcccaggagattaaaatcttgagaagatgataaaagtctgccttgcattttggggctctagagagggatgctaaatttctttctttctttctttctttctttatttttttgagacggagtcttgctctgacgccaggctggagtgcagtggcgcgatctcagctcattgcaacctcgacctcccgggttcaagcgattctgctgcctcagcctcctgagtagctgggactacaggcacgcgccaccaggcccagctaatttttgtatttttagtagaggcagggtttcaccatgttgcccaggatggtctcgatctcttgaccttgtgatccgcccgcctcagcctcccaaagtgctgggattacaggcgtgagccactgtgcccggctacatattaagctttataattcctaggtgctgcattattctggagggtgttttttgtttgtttgtttttgtttttttgagatggagtctcactctgtcgcccaggctggagcgcagtggctagatctcggctcactgcaagctccgcctcccgggttcactgccattctcctgcttcagcctcccaactagctgggactacaggcgcccgccatcatgcccggctaattttttgtatctttagtagagacggggtttcactgttagccatgacggtcttgataccctgacctcgtgatctgcttacctcggcctcccaaagtgctgggattacaggcgtgagccaccgcgcctggccttttttttttttttttttaattttttttttggggacagcgtctccctctgtctcccaggctggagtgcagtggtgcaatcatagcttactgcaatcttcaactcctgggctcaagcgatcttcctgcgtcagcctcccaggtagctgggactataagactacaggcgcaccatgccaggttaattggtctttctacttttttttttttttttgagacggattttcgctcttgttgcccacgctgcagtacaatggcgcgatcatggcttcccgcaacctctgccttctgggttcaagcgattctcctgcctcagcctcccgtgtagctggcattacaggcgtgcgccaccatgcccggctaattttgtatttttagtagagatggaggtttctccatgttggtcaagctggtctcgaacttctgacctcaggtgatctgcccgccttggcctccaaaagtgctgggattacaggtgtgagccattgtgcccagcctcatttgtctttttttaaatagaacagaaaggctgggctcggtggcttacgcctgtaattctaacacattgggaggccgaggccagtggatcacttgaggtcaggagtttgagaccagcctaaccaacgtgccaaaaccccgtctctactaaaaataaaaaaattaaccgggcatggtggtgtgctcctgtagtcccagctacttgggaggctgaggcaggagaatcgattgaacccaggaggtggaggttgcagtgagcggagatcgtgccactgcactccagcctgggtgacagagtaagactcgtctaaaaaaaaaaaaaagagaatcagtggataaaaaagtggatacgcttcgtttagtaagcgtttgtggagcgccaaggaagtgcacacggctccagtcctatgggacatttgaagggagtgagatgcagccagcttttaagaagagtatctttgttaagtgcatttaatctggtgtctttgtgttgtcttttaaaaggcatagtttttttttctttttcttttcttttgttttttttttttgagacagtctcaaaaaaaagagacggggtttcaccatattggccaggctggtcttgaactcctgacctcaggtgatccgcccgcctcagcctcccaaagtgctgggattaccggcatgagccaccccgcccgaccagtttttctttttttttttaaagaatttttttttggccgcgcgtggtggctcaacgcctgtaatctcccgggttcaagtgattctcctgcctcagcctcccaagtagctgggaactacaggcgcgtgccaccacgctaactaattttgtatttttagtagagacggggtttcaccattttggtcaagctggtctcgaactcctgacctcatgtgatccacctgcctcggcctccaaaagtgctgggattataggcatgagccactgcgcctggcagtaagcctgtttcttttcagaatgttttggtcaacagggaaagtgttacaatagtcatgtgcttggatttggagagaatcgaaatagactgtttttctttatgtgaaatcttgtagacttttagggtagtcaggaagatgcatttgacatgaagaaaaaacagtggctgcaggaatttgaatgtgatctgggtgtagttgaggtgtgtggtggcagcacaccgctctgcacctctctgcctgctggcggccttctggcagtgggatgagaatcgggaggtaagtaaagggaattttgttttgctgcctccctgaaggagctgaatgagcagcatgtgctcctagtacgtaattttagcatgtgctctgtcagatgtgttgagaggaaagtgatgcttattgtgtatattaaccatattaggttcctttttttaaaaaaagtggaaatttgtcagggtatggtggctcacacctgtaatcccaacactttgggaggccaaggcgggcggatcacccgaggtcgggaattggagaccagcctggccgacatgacgaaaccccgtctctactgaaaatacaaaaatagccagcgtggtggcgtgcgcctgtaatcccagctactcgaaggctgagacaggagaatcacttgaacccgggagacggaggttgcagtgagctgagatcgcaccattgcactccagcttgggaggcagagtgagactccatcaaaaaaaaaaggtggaaggtctgttagattgagctgctttctctgtagcaagggtttcctgcctctgacgatagtattctcactgggaagccagaattcgggtttgcctgccttgggccggcatttgtcgtgccctgaagcagcacaagtggcattggcttttcagctcaggtggtctgaggtgtggctgccctcgtctactgcccatgctgtcctcacagacctttcagagaagaggtgttagtctccagggtctcacccactcccacctgtgcttttgtcctgctagagacctctaccgtatttacttggaactaacttatttgacactttgtggcctcattttgtctctggcagatatcaacctgaattctcctaacaaaggtctgctgtctgactccatgacggatgttcctgtcgacacaggtgtggctgcccggactcctgctgttgagggtctgacagaggctgaggaggaggagctcagggctgagcttaccaaggtgctgtggcttggctgtctgtcctggggtgaattggagttaaggccctcttggattagtgagaggccagggtactggccacgctcgggaggaattgccctgggtggtcacctaccctgctctgtgttccgactgataacggggttctctttgtatgtgcccagctccatgcactggactcagagccacctggcagtggagacagggcatgactcccttcccatacctctgtgcctggcccttcctaagtgctccctgaggagtgttcacacatgaaccgcctctgagcagccatctgctgggagtgtctctgttggaattaacacttgataatcatttttaagaccccatgaatctttcttgtcctggatcttaagttttcttttaaacatatttattttggctggatgcagtggctcatgcctgtaattccagcgccttaggaggacagggtggtaaggtgggaagatcacttgagcccaggagtttgagagcagcctgggcaacacagtgagaccttgtctctacccccaaaaattagccaggtgtggtggcatgtgcctgtagtcccagctactcaggaggctgaggtgagaggattgcttgaggccaggaggtcaaggcttcagtgagctgtgattgcatcctgcacagcagcctgggtgacagggcgagaccctgtctcaaaaacaaaacaaaaacttcttttctaaaaagtatttatgtgatcttctttaagtgagagtcccttaagagtaatgtaggaattaagaacaaaagcctccaaccataatttttagtcaaaccaactgccaagagttttcttttcaccctgtgatgtggtttaattccagaatctgggtccaggcctaggtctgagtaaggttggttgtgccgctgagtctgaggaccaggtttcagatcctgaggacatcacacagctatttctagcctagaagattaaaggagagtagcaggaagtccaaggacactttgctttccatttaacttcagaatatgtgagtttagaaactaaatccacaaggtttttttcagagttgaattacaataaggtgaagtttttttttttttttttttttttttgagtcggagtctctgccgcccaggctggagtgcagtggcgcaatctcggctcactgcaacctccaacacccgggttcacgccattctcctgcctcagcctcctgagtagctgggactacaggcgcccaccaccacgcccggctaatttttttgtgtttttagtcgagatggggtttgttttttttttttggagacagagtctcgccctgtcgcccaggctggagtgcaatggtgtgatctcggctcgctgcaatctccgcctcccaggttcaagcgattctcctgcctcagcctcccgaatatctgggattacaggcgcgtgcctccctgcccatctaattttcgtatttttagtagagacagagtttcaccatgttggccaggctgatctcaaactcctgatcttgtgatccacccaccttggcctcccagagtgctgggattacaggtgtgagccactgtgcccggcccctacaaggtgaagttctgtattgcttttttttgttgtttttcttgagacagagtcttgctctgtcgcccaggctagagtgcagtggcgtgatctcagctcactggagcctctgcctccctggttcaagtgattttcatgcctcagcctcccaagtaggtgggattacagacgcctgccaccacacctggctaatttttgtatttttagtagagacagagtttcaccatgttggccaggctggtcccgaactccgagtctcaagagctccacctggctcagcctcccgaagtgctaggattacaaatgcgagccgctgtacccagccaagaaagagaatttttttttttttaaggacggagtctcactctgtcgcccaggctggagtgcagtggcgtgatctgggctcactgcagcctccacctcctgagttgaagtgattctcttgcctcagcctcccgagtagctgggattacaggcgcacagcaccatgcctggctaatttttgtatttttagtagagacggagtttcaccacgttggccaggttggtctcgaactccagacctcaggtaatctgcctgcctcagcctcccatagtgctgggattacacgcaagaaagagtttttttttttttttgagactttttgctcttgttgcccaggctggagtggaatggtgcgatcttggctcactgcagcctctgcctcccaggttcaagtgattctcctgtctcagcctcccgagtacctggggttacaggtgcatgccaccacgcctggctaatttttgtatttttggtagagacggcctttcatcatattggtcaggctggtctcggactcctgacctcaggtgatctgcccgcctcggcctcccaaagtgctgggattacaggcatgagctatcgtacccggccaagaaagagaatttttaaagagaagctagtcatatatgagctgaagatactgagaactcattctaaagtggtaaagctttgaatgatgcccctttcagaggtcatgttctttttttttttttttttttttaaagacctgagaaagttcaagtcttcatgatcaggaatctttctgttgctcagttctaactacgttaagcacaaaagataatttaccttttggttcgtgtaactgactcttgccaaggtttggaactgacctcaggaacacaagtgttttcttaagggtgtttttttctgtcacctgtgtcactgtccatctgcctcctcctctctgcatatggaattctatgagtgcagacggtgcccggctgccaacagttccagcttctattgtccaagcccagactgagagccctgagggaaaaggatcctcactgttttttgtttgtttgtttgtttttgaaacagtctcggtctgtcacctaggctggagtgcagtggcatgatctcggctcactgcaacctctgtctcctgggttcaaacagttttcctgcctcagcctcccgagtagctggggttacaggcgtgcaccaccatacctggctaatttttgtatttttagtagagacggggttttgtcatgttggccaggctggtctcaaactcctgacctcagataatctgcctgccttggcctcacaaagtgctgggattacaggcgtgagccactgtgcccggccagggtcttcaccatttttttgttgttgttgttttgttttgtttgagatggagtctcgctctgtcacccaggctggagtgcagtggcacaatcttggctcacccgcaagctctgcctcctggattcacaccattctcctgcctcagcctcccgagtagctgggactacaggtgcccgccaccgtgcctggctaattttttgtattttttagtagagacagggtttcgctgtgttaactgtgttagccaggatggtctcgatctcctgacctcgtgatccgcccgccttggcctcccagagtgctgggattacaggcatgcgccactgcgcccggccggtcttcacctttttaataccatgcccagtcctagtaaagagctcggacaaacctggcatggtcatcctgggccattcctcatgaccacaaatggacatggtgattggtagctctcccagaaccatttagttgtggggcatgggatagttccctggagtcaagttcctagtaccagataaaaacaaatgtctgctggctgggcgcggtggctcacgcctgtaatcccagcactttgggaggctgaggtgggaggatcacctgaggttgggagtttgagacgagcctgaccaacatggtgaaaccccatctctactaaaaatacaaaattagccgggcagggtggcacacgcctgtaatcccagctacttgggaggctgaggcaggagaatcacttgaatctgaaaggcagaggttgcggtgagccgaggtcgtgccattgcactccagcctgggcgacgagcgaaactccatctcaaaaaaaaaaaaaaaccaaaacccaaaaatcagatgtctgctgtagatgctgttattcctaggacgagttaatgctttggtaagcggaaagttcttgtgtaactcatggcactgtgcatgaggatgttagtcacttcctgcagtagtgatggctcatcatgtcaactgcatgctttgcaggtggaagaggaaattgtcactctgcgccaggtcctggcagccaaggagaggcactgtggagagctcaagaggaggctgggcctctccaccctgggggagctgaaacagaacctgtccaggagctggcatgacgtgcaggtctctagcgcgtaggtacctgccccaggcgcacccctgggggctgaagagaacgggcaccacacgtgccccggcatgtgggggggcgtcgtcatgcccagggacgagttgcagccgtggagttgagtggcctgtttggaaggatccagagagaggctctgagcccttggcccagcgactgtgccttgtttgttcaaaaagcttggtgtctacatgtgttttatttatttttaagtttttgtgtactttattattattttttttgagacagagtctcactctgtcgcccaggctggagtgtagtggcgtgatcttagctcgctgcaacctctgccccccgggttcaagcgattctcctgcctcagcctcccaagtagctgggattacaggcgcctcccaccgcgcccggctgatttttttttttgtgtgtgtgtgtgtgtgtgtgtgtgtgtttttagtagagatggggtttcaccatgttggccaggctggtcttgaactcctgaccttgtgatccacccacctcagcctcccaaagtgctggccaccacgctggccttttttttttttttattattattcttttttgagatggtttcgctctgtcacccaggctggagtgcagtggcgcaatcatgattcactgcaacctcaacctcctgggttcaagcaatcctcccaactcaacccccctcgtagctgggatgacaggcgtgcgccaccatgcctggctaattttttcacgttttatagagacagggtcttgctttgctacctaggctggtctcaaatttctgggctcaagcaatcctcttgttttggcctcctaaaatgcttgggattacacgtgtgagccaccacatccggcttatatacgtgttctaaaaaggcagacacactggctagttgtcctggtggaaaatgataggaagactgtttcagggtccagacttgagagagcactgatcaggtccttggcaagagcggtttttctgtggtccttgttgtgggtgtggcatggtcacagcctctgacccagatatggccatatgggccgggcatggtggctcatgcctacaatcccagcactttgggaggctgaggcgggtgtatcacttgaggttaggagttcaagactagcctgaccaacatggagaaaccctgtctctactaaaaaataaaaaaatttagctgggcgtggtggtgcgcacctgtgatctcggctactagggaggctgaggcaggagaatctctttaacccgggaggcggaggttgcagtgagccaaaattatgccactgccctccagcctgggtgacagagcaagactctgtctcaaaaaaaaaaaatatatatatatatatatttatatataggaccatatggtcccacaaccctagggactctgaccctccccgatgacgacgtggtcctacatgacgacgtggtcctataaccctgggacacctgtcccagatgtcgctcagctctgaatttggggagtgctgctttctcacttggccctgtccacgtggcttctctgaaacatacccttcaaggttggggtggctgtggaatgtttcccagaagacatgttcctatacaaagacagaacaggtcacatttcataaatctcacatatgagaggcccatgtttttgtcctaggacatcgtaagttttgaatcccaagggtgttttggagctgtgggctgtgcccttccagtcccccacagcagtgctgttgcccaagaatctcctagcgagagaccaggggctactgccaggtgacagaaaagggaacatcagttccgctatacccacagctcacctggcggcctggggcctgcacagggcctggttgaggcagtggaccccatttttgggccgtctgtggagttgatgttcctgccagctggtccctctctgtcttccctggaacttcacctgcagtttgatgcctgagttaaaattgttcttctaaataattcactgtagactttctgtttttagctatgtgaaaacttctgagaaacttggagagtggaatgagaaagtgacccagtcagacctgtgagtgcctgtatcatcagcacctcctccttcctcctctccgcctcctgacactcagtcggggaagggggctgtgcacacttggcacaaagcttgttttggtatttgctggctattttttcttcctataacttttcttctctcaggtaaactatcctttaaacttttgtggaacagggaatagtagctgagagaaactcactcagccacctgaccacacttaaaactcccctctgcctgatatgcgtcccttatgtaagaggcctgcactggtcctggctgtatctctaactaatagagctccttggcttccggcagtgcacaagctggacaacaccacttggcctgggtttgttggtggcgaatttttgtttgttctaaccctaacccttttccctgcttagctccagctgttgggttctcagaattcctttcctcctttaggggtagttcttgagtggagggcatggtgtaggatatgctggtggaaatttgaaatcctcacgatctgggaggcactgcattgtcagagcatcagccagtgtggatcaagtgtggatagttttgtatgtgtgtgtcagtggtgttgttcagagtgactcctaatatttggagatccttaaactagataatagcacttcatttacttgtgctctgatctgattataacgtctttaaactgaggaggggaatatttttaaatagtctctgtgggattttttcatctgttatttagaaggaagcgctgtaatcgttgccacagaacatgggcagaaagtcctcccatgttggtctgaaaggaagcagttgctgccgagcttgtcttgaaggtcctgggggaccaggctggcactgcgtgcacatggagcctttgcgtctggtgtcacggtgggaggctggtgtcaggaaccccgggcggttctcggcatgttgccccgggtattccagggacccgggtggttcgtgggcatggctacagcagccagctgtacatctgggtgctctggggacccgggcggttcacggcatgttgccctgggtattccagggacccgggcggtttgtgggcatggctacagcagccagctgtacatctgggtgctctggggacccgggtggttcatggcatgttgccctgggttttttttgtttgtttggttttttttttgagacaacgtctcgttctgtctcccaggctggagtgcagtggcgccatctgggctcactgcaagctccgcctcccgggttcacaccattctcctgcctcagcctccccagtagctgggactacaggcgcccgccaccacgcccggctaattttttctatttttagtagagacaggatttcaccatgtcagccaggatggtctcaatctcctgacctcgtgatccgcctgcctcagcctcccaaagtgctgggactacaggcgcccaccaccacgcccggctaattttttgtatttttagtagagacagggtttcatggtgttagccaggatggtttcgatctcctgacctcgtgatccgcccatctcggcctcccaaagtgctgggatgacaggcgtgacccactgcacccggcttgagcagggtgttctagggaccctggtgggctgtgtctcgggctgttgaacagtgactttgctgggcagcagatggttcctaggttgggacagtgacggtcatccttgcagtttgggcatcaggcggacgcacagtgcagactcagtctgaaaatagtcttaggagacttcagtgctgttttgtaaaaccaactgacataaagctgccgggatcctatttcaaataaatagtgttttagagagcttattacaacactcagcgtcccgacccctctggagaaacctgtggctcagcatggaagcatatggccagtgcatcacctggccgaggccattcccctgagttctgtggcgagagctgtcaactgacggttccagagtggaagcgtttctgccgggaaggcccaggccgagggcgatggtttctgccgggacggcccaggccgagggcgatggtttctggtgggaaggcccaggccgagggcgatggtttctgccgggacggccgaggccgagggcggtggtttctgccgggacggcccagacggaagggatgcggcttgggaggtggggcctgaggatgtggccatggcgcgtgctcttcctggctggtgcctctcctagtcagcttcaggagatgggctgtagatgtacctccactgcccagagctctgcaggggaaggcagtaaaagctccctgcatcctgacccacgtgtttgtagatcctttcagctattggcgccctggaggatggacgggaaggagaacgtggccggtgggtggaggatagcactggtgcctggccccatgaggctgcaatgcggccacattctcagtgggtcatgtctgaatgcgagagcagctgtgttctgcgagtggtgaaacaattgcctgttgcattctatttataggcagaggtaactaaaaacctcagtgctgagaggggcatcatatagatcctgcagttatgagctggttcacttggagttgttttggttgcaggtgacagaaagcacgactcaaggtagcatcaaccaaacagggaggtgggagcactcaccaggcagagaagtccctgcccccactgctgcagcccaacagtgtggccccatatgggtctccctggactaatggctgcggccttggaggtggtgtgctctggccaggcctggatcacttgtccatcctgagtgggagtgggggcagcccccagagacagactcaggagagggggagtgcaaggatgtcccccagatgccctgtgctgcccaggggacagctcactggcagtgggacgaaaccgctgtctgtccagggctctcttcctagaaggtcttaggaactcccaaatgggtgctggctggggttgcccggcccggtgctctcaaggagagctgaagctagttattgggtgcagatgctggctctgacccctgccccttcctcccgggctcagcttccccatctgtcatggagtaataacaacccagccttctggtccactgaggaatgtgtgtgcctgtgtgtttgacgctctcagaacaggcctgcagcgctgtgagccttggaagggggcctcacagctgctgccgccaccttggaggcccaggatgggactgagaaggggaagggagaggtcagagccacagctgttgggcagggacctgctgtaggaagagaaggccagggaggcgctggtggtggcctcaggctatgcaggtgatgcccattgtttccagggccatcccagtttggaggttcctgtttctagaggaggttcccttgtgaccccctcatttccacacccgagcaatgctgagggctgtggggcccccaggggcttgagtgtggtttatggcacagcagggactgatcacagtggcaccgggtgtcagtggccagtggtcagtggccaggaaccctcaggaccctcctccttgtgtgggtggcatttacccacccacaggtcacgctcaggacccgcatctcattccgatcctccttgtgtgggtggtacttacccacccacaggtcacgctcaggaccccacatctcattctgaaggccgggcacaggcggttgttttctctccaacttcggtttccccatccccactcttagggcacaaatgcaggtgtagcttccccatgcccactctttaggcacaaatgcaggtgtagcttccccatccccactcttagggcacaaatgcaggtgcagcttccccatccccactcttagggcacaaatgcaggtgcagcttccccatccccactctttaggcacaaatgcaggtgcagctttcccatccccactcttagggcacaaatgcaggtgcagctttcccatccccactcttagggcacaaatgcaggtgcagcttccccatccccactcttagggcacaaatgcaggtgcagcttccccatccccactcttagggcacaaatgcaggtgcagcttccccatccccactctttaggcacaaatgcaggtgcagcttccccatccccactctttaggcacaaatgcaggtgcagcttccccatccccactcttagggcacaaatgcaggtgcagcttccccatccccactctttaggcacaaatgcaggtgcagcttccccatccccactctttaggcacaaatgcaggtgcagctttcccatccccactcttagggcacaaatgcaggtgcagcttccccatccccactctttaggcacaaatgcaggtgcagcttccccatccccactcttagggcacaaatgcaggtgcagcttccccatccccactcttagggcacaaatgcaggtgcagcttccccatccccactctttaggcacaaatgcaggtgcagcttccccatccccactcttagggcacaaatgcaggtgcagcttccccatccccactctttaggcacaaatgcaggtgcagcttccccatccccactcttagggcacaaatgcaggtgcagcttccccatccccactctttaggcacaaatgcaggtgctgtgagcgctttagaatcctctgctgcaggtgactttgcttcagcgaaccacagaatgttcacatggttttatgcatttgttatttcagggaaaatcaaggttaaagatgtcttcagaatttgtatttttgggctgggcacggtggctcacacctgtaatcccaacacttttggaggctgaggcaggcggatcacgaggtcaggagatcgagaccatcctggctaacacggtgaaactccgtctgtaccaaaaatacaaaaaaattagccggatgtggtggcgggcgcctgtagtcccagctactcgggaggctgaggcaggagaatggcgtgcacccgtgaggcagagcttgcagtgagccgagatggtgctgctgcactccagcctgggctacagagcaagactctgtctcaaaaaaaaaaaaaaaagaatttgtgtttttgaaactaaatatagcaggtcattagttacttataactggtgttttattaataaaagaagaaaaaatttaaaaacagccatgattccagctgcacggagcctggatgggaaagtgcatcctctgggctgagcacggtggctcacacctgtcatccgagcgggctgggcgcagtggctcacacctgtcatcccagcactgcgggaggccgaggcgggtggatcacctgaggtcaggagttcaagaccagcctggccaacatggtgaaacgctatctgtactaaaaagacaaatttagcagggcgtggtggtgggtgcctgtaatcccagctacttgggacgctgaggcaggagaatctcttgaacccggaggcggaggttgtagtgagctgaaattgcaccactgccccccagcctgagtgacagagcgagactttgtctcaaaaaaaaaaaaaagaaagaaagtgcatcctctggtaggccttgggccgggggcgggcatgagagagctgcgctgggatgcgctgccagggcacacttggtgggtcacacactcttgtcaactgtttgggggctggagagtagtagcactcagctcacacgggccttctgcagggagtggtgggagggcctgtgagtaagggctccggaaggcccatcattgggacctggtgccgccagtgggagcaggaggagcctgtgccttctctggcgccagtcatcccagatgccactcagggcttggctgggtttgccagctctccaggttggcactggtaacgccaagatggtcctgggagcccatctccattcagcctcgagttccctggcttcactgagggaggagccgtgataaggtggctgtgggttcgcattttggactttgttatgtcagagtctgctgtgttttgtgtttatggtggcagctggatgagggccagcgacttcaggtgttgactgtcatggtgggcccaacagtatccctgcagccacagcatcctgcctgctgccctttgcctgtcctgcagacgccaaggccctagagctttgctttgatgggatgtacccatgtgggtggacactggagggagctggaggggatagaagcggggccttcactaggggccaggacagacccttgcactgtgaaaagaggcctgggaatggaactgtccgatgttctgaaggcacacggggccccgccgtctggagcaggggcaccttgcgggctgcatggccactctgtgacgctcgttccccacagacgtggttgagcttgcattttctcccctcagcacagtctcatttgggaagaggaaagggaaacttgcacgcatgggccggtcagggcactgagaggcctttctgctctggcactgcctgccaggcgtgcacctcagggggcccgtccgctctagcaggcaaatggggcgtgttctctgtagtcagaggggctgtgagaagacaggaaagcgagcttagtgggtatcaggcaagggggtgaaattgggttgtgagatgagaaagcagcgtcattgcagggctggggggccgagactcggcagggtcgccgagagctcagtgagcgagcaatgcacaggcggctcctcgccgcaggggcctctgggggccgaggggctctgggcctgcaccccctctgtagacacctggcgagtgtccaccccttggcccagctcctttcctcagttttcctcgggcgtgctcccagtgctttgtttgcttggctgtgggtggtgacccgcccatgctgtctggttgatttaactggtgtgtcttccagctacaagaagactcaggaaactctttcacaggcaggacagaagacttcagctgccctgtccacagtgggctctgccatcagcaggaagcttggagacatgaggtgagacgcaaccctgactctgctgccctgagacctggccaggagtgaggtgaggtgttggaggtgctacaggaagcctgcctggagatcagggctcagatgcactggctcagggatgtggccatccatcatggccccgaccagtctgtgtgcagacccttgcctgggaggttcgtccatccccgttggctgcttttctgccgttgctgtgttcttcagggagggttggctgccagtgctgttgggtaacttgtggtgctcggggttggtgagggaggagtctgcaccttgaagcttcactgagtggcagcgactccagcccaggggtcagagtcaggtcagtgtgggacggcagtcctccaccatctctaggacaggggctcggcgtggtacttcctcaggctgtttcccaggtctcagaaagtgcagtcagacgccaggaggccctgaatgagccttctctcccagaggctggtgaaagcctcctggccatcagaggtccctcagcaagcagggctggggccaaggagtgagcagggggccggcgctttgtggctggcatgtttgctcttccttccctgttctaggctccctgactacagcatggtgatgaggggattgagccagaagcctgggtatgatgcttggctgggctacctcctggctgggcaccccagctgggcctcaggcacgccttctttcacaggggttgtaggagtggatgatataggttgtcaccatcaacagcatcctggccccaacttctgggtgctgctgcccaccctgccctgacccctttcccattctcagaactggtcttctggcttttggatctcagggagtgcctccctgtagctctgacccaatcctggcaaagatgggtgcaggcttcctaaaggaccggtgtgtggagcacagtgctgaccccacccagccctcccctcttcccctcttgtggcccctgcaggattcagagatacgtacatctcctgctgggctgcctgcctgcctgcctgcctgcctccctgcctgcctgccttaggttaggtgtgtcctgcctccccgcctgtggttgccaggtgggggtcgtcctgcgccagtgctttcccctgaccactaagccacaggccaggacacagacggccacacacacccagggacccaccctgccaagcagaggggatggccactgcccaggagctgtgcccacttttatttttgtttttttgaggtaatctaccttcccatccctgcaacttctatttcgagaagttttaaacctctggagaagctgcagtcatcagtatgcaatgtgtgtgtttcctctgtgcaccctcacacgcccaaggctccacactccccagcagctgtgacttgggggggtccttgtggggcaccctacaaatgcaggtcttccctaccactgctgagctttggacccaggagggaccccctgagtttcagctgaactcagcctcgcagggctgttttcttcccgaaaatgctggtctcaccacagagcatcttcaggaagtaacaggtgtttgttgtgcctaaattatgccggccatcaggaggcgtttgcccactcttagtgtccacactcccttttgagtttgttcagaccattgtggtggaaatccaaggggcacgtggagcccttggcactgattggaatagccgtgcacaagccagtcctagggttttgatctgggcatttgtttgtatggcctgtttttctctggaagcacagggacacggtcctggttctctgtctgctcctccttctctgatggggagaaaggctttcgctctctgctcagtcctggggttggcagctgacccgtgtcgtgtagcctcagggcatggctggcagtgagcagagttcctgttgcagtgacgctggcacagctgtcagtgtgcccagccacactgtgccacgtgtttgcacgtgtgccctggtacatggggccagctgggggagcggggcctcaggctgacctgggacgagccagctcgctccagttggctggccgtgttcacggtgcccgtggagggtcctgtttgctggtgtgtcttgccctgcttgctcctccatttatgtttgtagtggtggtgggaactctgacgtctggagcccctggtgtatccccatcatctccccaagcagtcacaggtggtttctgaggtctgggcccattcacctcgagttagagactgaggttgagagctcactacttcctgaaagtgaaaattgggttctgggaggtttatgtcatgagtttagggctggatgaaccccggcggacccctgctaactcttgggcggaagcccctctggacagctgcccaacgcccgtgtccatgatgggcctgtcccagggcagccccggtctgtgaggcctttggtgtgccctggggcatgggtgatggggatgggaggaagggaactggattcaggtcagagtgggggtttacagcagggtcaggtcaccgtctgactccgtggtctcagatgaggcatcggccctctcaggacctcgggcgagttgagtgtttctcagttcttcagtggctccctccatgtcagagtgggcctggctgcagtgagtggcagcagctgcccttggacacacaggtttccaggttggcgtctgtgggcacggatggagcgcagagcagaaatgctcggcgccaagggtgtcccacatcctcccacggtgcgtgtgctccctcagctgacgtgatttggggaacacgggccgctctcgttctgtggagctggccaagcccagctgtcatgctgtggcacatttcacacctttgcgctgctggatggggctggttgtgctccaggtgctgtggcttctccaaacaggtgtgccttggggcataaggcgtggacagggcgtggacccaggggcctcttgggcacagccgtgaggctgagcagttgctagtcatgatcttgcgagagcctcctgttgagtcaggacttgaggagactggagacagtgctgctgtccccggtggtgtgcggactggaggagccgtcctggagggtcttcccctgctgggcctgactgagcacgagcagggggcctcccctggggctccccgaggagggctgtgagtgggtgctggcctcccttgcttacacttcgtttcctcttctctcctgctgccaccttccagggctcatccattttcacactcctttaggtaaggctgagcctggacacacctgtggaagacttttctctgaattggggcagggtggactccggcagggcccttgggcggctgtgctagtagagggcagtgaaagtgggatcaccccttccaggacagcagtgccagccaggtggttgctgcatctcagggaacaaagcagcagcgtgggatcgacgcagaggccccccggaaccccccggcccttctgtgtcccctcctcgtgcttcccttcaggctcacagaccgcctgctgccgggtctgtgaataactggcctggcgtccaggcctgagtttactcctgaaaaggagcttttttttttttttagacggagtcttgctctgtcgcccaggttggagtgccgtggcgcgatctcggctcactgcaagctccgcctcccgggttcacgccattctcctgcctcagcctctccgagtagctgggactacaggcgcccgccgccacgcccggctaattttttgtatttttagtagagacggggtttcaccgtggtctcgatctcccgacctcgtgatccgcccgcctcggcctcccaaagtgctgggattacaagcgtgagccaccgcgcccggccttttttttcttttttttgttggagtctcgctctatcaccaggctggagcacagtggtgtgatctcggctcactgcaacctccagctccctggttcaagcggttctcctgcctcaggctcctgagtagctgggattacaggcatgagccaccacgcctggctaatttttgtatttttagtagagacggggtttcaccatgttggccagcatggtctcgatctcctgacctcgtgatccacccgccttggcctcccaaagtgctgggattacaggcgtgagccactgcgccgggccctcaaaggagccttttcacgtgggagggctgtgccgactctcaccaccttcctgttcaacatctgtcctgtttccttgttttccttcagatggagttttgtcttgtttactacccgagagcccataggtgtgcctcccaaagggccctcctgcagaccagagcaagctcctctaggccaagccggggcgccgccagcacgtgcccttctgctggaaccgggaggtctagagccaggcccagaacaatctgtgatttcttgtgtttttacttgacttggtggtttctcttttgccaaaaggtccttacttgacttctgaaggctgtttgtaccaaatacttttcaaaagcccaagcctggtctcctcacagcttcctatggcagtgctctcccccctcccagtgctatgcgctgggcaacttggggtgccccccatgaggccaagggaggaccctggggtcgagtttccttcgggggcattgtgtggaggggcaggcagctcgctccaactgctgggagtgggggaatcccagctctgcccatccctgccaagttggggttgtgtgtggatcttggtgttaactcttgcttccttctctgcttctgccatgcttccaagcagcagctactccatccgccactcaataagtatgccagccatgaggtaatgtatgcctgctcgctgcggctccagagccgggtgtctctggtgggggttggggcagctcccgccggttacaccttgcccttcccatattcctggattaattgaggactccattcccttggcaacctctgatgactaagggccggtaaaaaccccctctaggctgacgaggaagagctggtagggggtcaggctcttcacctgcagcctccagaggagatccttgtgtcaaactgggccgtgtcctttccaagtcctgaccctggctgcctgcagtgggtggggtggggttcgaggggctcgcacacagatcctggcacttgccctggtgggctgtcactcaggacacttcacggtctcagccttcacggaaacacccagagctgtggtccttattctgtgcctgtcaggcaccaccctgattctcaggattctgtgcctgtgccgtgaggcactgccctgattctcaggagagcccagaactgtggtccctattctgtgcctgcgccgtcaggcaccgccctgattctcaggagagccctgttctccttgtggggactctggctgggtgtcgcagacgtgctggcctctagagtccccgggcctgggaggggtatctgtttgtgtgggagggactgagtgggatggagctggcctgctttctcctcttgtctccttatcactctgctgtcccagaagtgtccttggtcttccgtttgcttctctgagagatgtgcatgaagaactgcacagacttttcataacttcagtacgagagcccagggtgtccctgtaggggacagcagagaggggccgacagccccccaactgcgcagacttttcataacctcagtacgagagcccagggtgtccctgtaggggatagcagagaggggccgacagccccccaactgcacagacttttcataacctcaatacgagagcccggggtatccctgtaggggacagcagagaggggccgacagccccccaactgcgcagacttttcataacctcagtacgagagcccagggtgtccctgtaggggatagcagagaggggccgacagccccccaactgcacagacttttcataacctcagtacgagagcccggggtatccctgtaggggacagcagagaggggccgacagccccccaactgcgcagacttttcataacctcagtacgagagcccggggtgtccctgtaggggacagcagagaggggccgacagccccccaactgcacagacttttcataacctcagtacgagagcccgggatgtccctgtagggtatgacagagaggggccgacatctccccagctgcacagtcaaggggtttccagttgccttgtgtgacgtctggacctgtccctgtggttgttgggcatggccgacctcacttttgacctggggagtctccggaatgacctggctgtctcacagttttgccatgagatcttgggatgttgttagggaccctttggaggctggccctaaccctgaggcccttccgagttaggagagcagcacaaccctctcctcttgacaccgacactcttccctctctctttaaaggaactctgcgaccttcaagtcgtttgaggaccgagttgggaccataaaggtaattgtacctggactgtttgatggtcttggcaaggtgtgacctgttacagcaacttgtttattattagtcatttagttatggtagactcacatacagttgtgggaagtaatgcagagaggttccttgtgccttttacacagttctctcctgtgacgacatcttggaaaatcctgtagtgcagcctccccaccaggacattggcactgactcaggacacagaacgcctccacactgcccttcctggtccccactgcccttcctggtccccactgcccttcctggtaccttcttggccatgctgaccttcctcccgccctacccccggcaacccctagtccactctccctttgtataattgtgtcatttcaagaatgtcacgtaaatggaacgatacagtgtgcagctttttggcattcactgtcttcatttggcatcgttctctggagacctgttggggctggtgcccgtccgtgatttgctccctgtccctgctgagcagtgttcgtgttacataagcttttgtagagcattgagcatgggcctgggatctgccttgtgttgtgtgctctgtctcaggtttttctgtcttcatcttttctctcctgtagtctaaggttgtgggtgacagagagaacggcagtgacaacctcccttcctcagcggggagtggtgacaagcccctgtcggatcccgcacctttctaagcctgtggttgcttcacccgctgcagagcacacgcaacccagcctcagcatcacagccgcagctctgttcagcggagcagccagccagggcggatgagcagagccggccctgaggacagtcctgcccatccacgcggagatgtggctgccgcgtttgcatgaatttgaagaacacaggcttgtacacagatgttttacactcacgtttgtagatgaaacagatcactgtgctgtccttcctaggggtgcaggaagtggacagggcggagggtttgaaagaatattgagccaaagcccaggctccctttgggaatcatgttagcccatcagaatgttgaaggattgaagagttctaagcataaaataagtggcattttctgacttcttcctcctcctccttccctgactcacagaaggaatgcaatcacccagcaagtcctacctgttacgcaattttttatctcaaaatgccgaacgagaaaactgtccattttctgagacccccagaaaggaaactgaccctcagcagctgcctgattgttacgcgaatctagctttaacggaagcaaattcattattttttaaatgcagtggacttttcaaaaagtttaaattaggcaaagcagctttagcctcatagaatattatttctttggactcaagctgaaatacaagccttacattgccttatgctttatttctttctaatttttatatgtatatagatgagggttccttaatggttgtgagcattgtgtggaattttacacctggcctgcgtggcagcctcttccagttgaggtgttttatgtcacgcacactccatcccagtgtacaaaacctgcttctcttctcaaccgtggcagctcccgctggctcctatgccctgccctaaagggctcttgagcctctgggaatgggaggggccaagagaaggaaaaccctgtctttagcaccctttaaaagaactgtgccccccttctcagtgctgcctttgcatgggcctggcccggctcacattcgtcagtgactccaaccctcctgcttgctgtacttgggatgaaacgaccccacaggtcaggtggagggtggggcgtgggcatcagccaggattgccgttacagtctttttctcaggagctacaaagatctcttcctgttactaaatagtcgcaccccagcagcctctctcgcacaccggggccctgcatgtcagatggcgtggtctgcagggggagctctgtgccttagtggctcttggcaggacactgagggcctgcctgtggtgtgcccggctctgccactcccgggaggggaagggctgctcagctcaaggtgtcctgttcggtagagcaagtgtcctctgacagccgtgtccccggacagttcagacacccttggggatggcactccacacacgacagagatgcaggggccagggaagcccagcgctcggtgcccttcgtccagggttaaaatcggcctgtggggtgtggtgagaaggcaggttgtgcgggtgttgaccgatgtatcttttccttaaagttattataataatgggtaatttgtcaataaagcattcctttgggggaaagtccgcctcggcttgtgtgatgtatcgttcgggaccatgataagagtggtaaatgaactggcacacggtacctgccctaatgagtccgcacccttgggagaggcaggcaggggacagtgctaaagacaaagggcaggtcctcaatgctgggacaaggggagccagctgtgaggggagaatggtatatggccaacctgtgaggtcagacccagcgtcttgggaagaggagttgaaactgagccccaggaggcggaggaggagctcaccaggctccaggttgggccgggagctccagaggcttcgccagctgcccctgcaagcactgagctgctgctgagcacacctgtagtccccgccattctggagggtgaggcagatcacctgagcccaggagttcaggaccagcctgggcagcataccgggattccatctcaactaaaaacagtaggctgggtgtggtggctcatgtctgtaagctcaggactttggaaggccaagatgggaggatcacttgagcctgggagtttgacaccagcttgagcatcgtagccaggccctgactctacaaaaaagtgaaataattagccgagtgtggtggttcacacctgtaatcccagctgctcaggaggctgaggtaggagaatcatttgaacccgggaggtggaggttgcagttagccgagatcacgccattgcactccggcctgggcgataaagcgagactctgtctcaaaaaaaaaaaaaaaaaagaaaaagaaaaaggaaaagacccttgagggggaacctccactctgcccctggtctggcgctttgcatgtatccattcctagtctttggagttcccactggaaaactagtgggagcaccagtcttcctttggaggtcagaggtagctgggctcaccccagatgtaagagcagggaaagttaggtgacctcgaattgtatggtacataagccccaatacagcagggagctggtaccaataaagggtgaaatgcactattgccgcctgcagtcaagatttacactaatttattttggaatgagttcatgtgttcttcatttattgaacagatactgtaactgccctgcgggtaagagtctgctaggttttgtggggtacaagggtgaatctgatgtggacccagtgctcaaggactttgcaacccgtttgttggggaagacagattcccctaagtcactggcttgtgtttgacgaggtgaagcgcttggagagcttcgaggatggagcaagtggagtaagtggacctgaggagcgggcagcaatgcctgaaggctcagtcccctcttctcagagtgagggtaatggtatctgcctcatcatattgaaaggcttaaccttataaagcacttagcacagggcctgatgtatcagaggtaaacatcagactcttcccaactgtagccactgtcaactttcctgtcttcttttttttttttgagacagggtctcactctgtcgctcaggctggagtgcagtggtgcaatctcagctcactgcaacctccacctcctgggctcaagcgatgctcctgcctcagcctcgcgagcagatgggatttacaggggcatgccaccacgcccagctaatttttgtatttttagtagagacagggttttgccatgttggccaggctggtcttgaacgcctgacctcaggtgatccgcccaccccggcctcccaaagtgctgggattacaggtgtgagccactgtgcccgggcgtaccttcctgtcttattttctccaagcaggctggaatgttcatggatagatatatgtgtgataatatactttttacatatcatgcatcgtgctcattttagtttcaggagttctttgctcctgtgtagcctttctacacattatctttctttttttcttctttttaaataagagatggggtcttgctctgtcacccaggcaggaatgcagtggcacaatcatggctcactacagccttgacttcccacccgatccagcctcctgagtagctgggactacaggggcatgcatgccactgtggccgggccaattaaaaaaatttttttttatagagatggtggtctcactatgttgtccaggcaggtctcaaactcctgggctccagtgatcttcctgccttggtctaccaaagtgctgagattccaggcgtgagccatgggtcccgttgtatacatttcagtaactatattattccatttgagtgctcacttgtgcagttgggcaggtttccattctcgctattaaaaatagtgccttcatgaatatttcagtgcatatacctttttctgtatttaggaatattttctttggaagaatgtccctaaagtggaactgctaggtctcagagggactcacttaaggctggttcattcattcttgcagctcccagcacaagtggaatatagcttcaatctgagatcggtaccaggcccatttcattctctcatccctccaattctggcctgaaatatttcattctcttggaatctatagttgtagatatgaacctggcctttctgcttcttgggttccataggccttttcttgctgcctgcttgatgttgcgcagcttaatgactgctaggaggcttcccaagctctgacacttccaggctgtgagactggaacaagcttggcaattcaagaccggcattatggcagtgagttatgagggcagaggaaggaggccagagcgtgttgagagagaatttgggtttcacgcagtgtgtcacgggaagccttggatgctactgggtttgttttaaaaagatgaccgcactgaactcaggtaaacgggcaagggtggaagcgaggaggcaggagcaccggccgcagaggtctgggagcttctaggatgggaagtggcccaggcagcctacgcggggcaggccgtcagtgagtggcggagcgcctgcagttacagggacagggaagggtggccgacgggatgggcaagggcagagggaggtggagtggacgttcgtggtcctgcctctccacgctgctgtttggagatgattccgggagggtgggagggcgctggcgacggcatttcagtggttggacaggaaggaaggaaggacgtcccatctcggcgctccagggttgagcaaatgtcagtcccaggacggtggctccgggtgggggcgggggcgacggtccgcagccgtctcccaccagctccctgttcagttctttgatgagaacgattacgttttctcagtcttacttaaagcgctgagtaaactcacctgcaagaccagcaagccctgcgcttctctttctgcgcggttccccgcagcacatggcgtgtccacccgggacccacctgcggccacctgaagactgggaggactggctccgcccccgcgcttcgtccccgcccactcatgggcggagcctccacagggcgcctcggccccgggctgtcactcgggactccgccccttcatggacggagcctccgctcggctctctgagcgcatgcgcagccggtcccacccgcggctccgacacgccggagcccacgtccttccgggagcgcgcgcgccggtgcgggtgcgtgcgtgagcgtgctcgtctccgctgccgctgccgctgccgctgccggtgccgcacccgcgccctctgccgccgccgccgccgccgcccggggtctccaggctgaggagtgcgtcggccgctgcccagcagcgccgcgaatcggggagcggagccgcggagccggcgggagggcgggcgggcgggcggacgggcaggtgagctcgctgcgggtcgggcgggcggatcggcccacgtcaggcccgggcaggcgggcgggcgggcgcgggtggggggcgggggcggcactccagagccggaaatggcggcgacccccgggccggggctgcgcgggcgctcggggccggagctgctgcgacgccgcggcctgggccggggcgggggcgcgggaaggtcggcgccggggcctgcgggagccgggccgggccgggccgggggtctgagcaccgtggtgggggctggggcggcgctctccgcgggtctcttcgggcccggacgccccctccgctcccccaggtccccgcggccgcccccaaccccccggggtctcctctcctgcggggggactggagaagctgggccatcgctggtcttagggaggcagataatttagtccctgggtcgttgtgtttatagctcggggaattgaaaattgttctgtaacgcatcgtaaattaatctttccgacgttgtaaattccaaaaagcatttggtttgttagaaaaaacctgttttctccgctttataaaaacatttgaagccatgctttatattgaactcttaaggagagtattaggaactcgtccgttcaggttctaacttgttggtgttaagtgtctggattaaagactctctttttcgtgtgccgaagccatgatttctcaaattcattcagttgtgtcatacaggaaaaggaagcaaaaatttcagctttatttttgttttccggcttaggcttggttgggaagatttgatggtggttagacacgtctgcccttatttgcctgtttagaaaaacctattctaatgacaaaaacagttacattgctcccactattgtcatggttacctgaaggcaaaagtttactcaaagcttctgagattttatgttcgtttatttgcttctctttttaaaaaaatgtcagctgagtttcaggaatgagtagtctgtcaaacaagagatgaaattagaagcctggatctaagggctttggggaagtttcggttgagttcccctttcacttgtgtcggtgctgtaggactcggggtggctccagctggcgtctggcccagcagagagctgtaggggcccgctctggttgctggctgtgtggactctgagggacacccctggcgagggtgttaatgagcctgcagcgtctgagtccacccaccctcagactggcccctgactcactctgcacctgccatatcagcctccttgctagttctgaacagagccacatgctctgtccttggatcttcctggaatgcctggttccttaaccccctagcctggcgactgcctgcctgccttgccacccagttcccttcctcgcttaattttcccacagcgctgaatcctcctagtgtcctgcttaatgcatttatcatacttaatattttactgtgagttagtaaggtccgtggagagaatgttttgtgaaaaaaacagttgctggcacatgatcggggcccagtaaatatttgttcagtgaatgaacgtgaggagcttagcagcagctgtgcgtggtgctggccttgtcacccggaagtccttgtcggtgaggactgagcatgtagaggtaagggttcctggagtgttggccctcaggacagagagccaccatctctcacctgcccaatgaggaaagacagccaggtaaggggtggcttggaagggtgcatgggacccttgtaaatcttttcgcaactttgaatctataattattttgaagttaaaacgtttctaaaaagtcagatctgttgggggcacagtggctcatgcctgtaatctcagcactttaggaggctgaggcggacggatcacttggagtcaggagttcgagactagcctggccaacatggtgaaaccccatctctactaaaaatacaaaattagctgggtgtggtggcgtgtgcctgtaatcccagctactagggaggctgaggcaggagaatcacttgaacccaggaggcggaggttgcagtgagccgagatcgcgccactgcactccagcctgggcaaaaagagcaaaactccatcttataaaaaaaataaaaataaaaattagctggttgtggtggtgggcgtccgtaatcccagctactcaggaggctgaggcaggagaatcccttgaacctgggaggtggaggttgcagtgagcaaaggtcacgccacactgcactccagcctgggtggtagagcaagactcagtctcaaataaataaaaataaataaaaagtcagatctgccagtggtaataatgcttttagaaattttgtctttgattaccaggaaaaaccctacatgctagtccttatactccgtcgtgacatttggtaattaagtagagtgaggtggaatgatctccctggctcttaattcaggaggactgcctgagagtgactgtggctgatccccttagcatgaggcccttcagctgtggtgctgtgacagagccacagaggctgcttggtgacttgcagactctggagtcctttccacagcctccacctcatgcctacattaactcagagtgagtgggcttcagggccttcctgcatccctgaagatggttgtattaacgtggttcagagattgaacagacgctgcacgtttctcaggcatttttcctcagttccccttgcttggagggtggataccactgagcctggttgtacagctgcctccgtgaccagcacctttgcccaaggtctccctgttaacaatcgtcagagctggaacttgaactcgagtcttctctagaccaggtttcttctaagtatttggcatcaccaggaagagccctgtacaaggtgctggtggttttatccttagagcccagatgtgaggtgctcacgtgtgtgcctggggttagcagttggtgtttgttgaatgaatgactaaaatgcagtggggcggggagtcatgataaggtagaattttatctgaggtggagtttgcttctgaaatcaggcagtaaggtgaatgtgatacccagttaggagtatgtaatgctgcaggtaaactgtaacagcaaatgaaagcagtatttctccaggaaggaaacagacccctgggtcctcgggctgggttggaaaaagccatttgtagagaaatggaacatggtggctagccctgcacaagacatagagaagagacccttaacactccagttatctccaagtgggcagttagaatgagtgcttctaggccgggcacggtggctcacaccagtaatcccagcactttgggaggccgaggcgggcagatcttgagatcgagagatcgagaccatcctggccaacatggtgaaaccctgtctctactaaaaatacaaaaatagctgggtgtggtggcgggcacctgtaattccagctactagggaggctgaggcaggagaattgcttgaacccgggaggcagaggttgcagtgagctgagatagcaccactgcactccagcctgggcgacagagcgagactccctctcacaacaaacaaacaaacaaactgcagtgcttctaaggtgagactcatcgtgatgttctgattagaacgttctcgtgccacaaagtcctgagatgtgtccaagaagcaccgtcttctgtcagacacacctcctgccccgccataggccttcccactgtggcagcagaatctgtgctaggccttccttcgtgaaagaggacaagatcagggctcacgtgactggggccgctgtgactctgagcctctgcgttctgtcagatgagggtagtggtgcttcccctgcgtcctgctgggagaaaaaaggaggcagtaaatgaaaggtgtctcatcacctgcttcctaaatagaagggacaaagaggctgaaaaacagtaatagtcttgttttatgaaaatgccacccctaatctaggagctgggactgccatgccaggacccctcagataatgacatccctgaagaggattagcagctagtctgttatcagtcacaggcagttcaacccagaagatttaaggattagattacccaacaaccttgagtgtagattttgtctctcatcaccctttgcattaactttgggtgcatgtgtgttaatgaggaagtgtgttctgctttattcttggtacatcacagacatttaatagatacaggtcattagaaataaaaattgttttaacttgtatgagttttgcaagcattgatatttcaaattgaaattgcagaaattaggacagcatttcattttcttttgtttttttgagacggagtctcattctctcacccaggctggagtgcggtggcgtgaccttggctcactgcaacctctgcctcctgggttcaagtgattcttctgcctcagcctcccgagtagctgggactacaggcggtcgccaccacgccaggctaattttttgtatttttagtagagacagggtttcgcggtgttagccaggatggtctcgatctcctgaccttgtgatccgcccatcttggcctcccaaagtgctgggattgcaggtgtgagccactgcgcctgggcttttttttttttttttttttggttgggggacggagtctcactctgtcacccaggcttgagtacaacggtacggtttccgctcatggcaacctctgcctcctaggttcaagtgattctcctgcctcagcctcctgggttgctgggattacaggcgcctgccatgacacccggctaatttttgtatttttagtagagatggggttttgccatgttggccaggctggtcttgaactcctgacctcaggtgatccacccactttggcctcccaaagtgctgggattataggcgtgagccactgagcccagccccaagttggtcttgagctcctggactcaagtgatcgtccaaccagcatctcattttctaaagaaagaagtacttagaccaggtttgggacatgtctctgaaaattctgggctggtgcagtggctcatgcctgtaatcccagcactttgagaggccgaggcaggcggattgctagagtccagaagtgaagaccaggctgggcaacatagcaaaaccccatctgtactaaaactagaaacaattagccgggtatggtgacatgcagctgtagtcccagctactcggaggctgaggtggtaggatcacctgagcctgggaggctgaggctgcagcaagccatgattgctccactgcactccagcctgggcgacagagcaagacactgtctcaaaaaaaaaaaaaaaaaaaaaaaggaagttctgtattgatcaataatttcctcctcaggacagacctgcatatgccacaatttaactttgttgcaacatcattctacattttgcatgaatggtttcaaaaaacttatttctatgacagagaactttgtcatttattcttgacatattaaacctgagtgacatttttaaatttttgtgttgtgttgtgagtgcttagtgaagattccttgaatatggatgtgaatgaatcttatttttcatgggtttataattgtattgtccctttaaatattctacattgaacatgtatcaccagcagaaataatcatttacgaggtgaagtgtccagagccatgtagtgtctgcattgctgtgtccagggattctttgtttgtttgagacggagtctcgctctgtcatccaggctggagtgcagtggcacgatcgtgtctcactgccgcttccacctcccgggttcaagtgattcttctgcctcagcctcttgagtaactggaattacaggcgtgtgccaccacgcccagctaatttttgtatttttagtagagatggggtttcaccatgttgtccaggctggtctcaaactcctgaactcaagtaatcaacccaccttggcctcccaaggtgctgggtttacaggcatgagccactgtgctcaatctgcgttctgaggcattctgtgcctgttatgaaatcatgatgctggcaggtcggaagatggaatcgacttcccagccccatcggctgtgccctgccctccttgctgtctctagagcgcggctgacttcggggagagctctccctgccctgtgcctctattttttcaccaggtagggtggaaatgtgttctagtgaaactgcagaacgaaaatatcccgtcttactcttgacccttgaagaagcaggagctgaattcaggtgccagaggctgcgtccgcgcgctccacatcagtctcagagtggaggcgagcccaggccagaggcctctaccccggacgaggctgcaggtgcctgacgggaggagtgactgcagctcagcagagggagtgtgtggagtgtgcggccctgcctggcttttattttgctcctcctgttattgggagggattagcagcagagcgaatgtttggatctttgctgagcagtcccatcggatttttctttattaaataggattgtgttttattgtaagaaggtttccctaagacaaataacgaaggaaattctgggtccaggagtacagactgtagcttctgtcatctcttgccaagttcgtagccctcagatggtgtctgtctttcccctttgcttgcggggccttttaccacagcactttggtgttcttttagctgctgcgataggactagctgttaaaatctgagattttacatttttgccagtcgcaataaattttgttagttctttcttgatgtgttctttaaaataataatgctttttttttttgggtgggggacagagtcttgtgctgtcgcccaggctggagtgcagtgacgcgatctcggctcactgcaagctccgcctcccgggttcacgccattcccctgcctcagcctcccgagtagctgggactacaggcgcccgccaccacgcccggctaatttttcgtatttttagtagagatggggtttcaccgtgttagccaggatggtctcgatctcctgaccttgtgatccgcccagctcggcctccgaaagtgctgggattacaggcgtgagccactgctcctggcctcatcttttttttttttttttttttttttgagacggagtttcactcttgtttcccaggctggtggagtgcaacggtgtgatcttggctcaccgcaacctctgccttctgggttcaagtgattctccagcctcagcctcctgagtagctgggattacaggcgtgtgccaccacacccagctaattttgtatttttagtagagatggggtttctccatgttggtcaggctggtctcgacctcccaacctcaggtgatccactcacctcggcctcccaaagtgctgggattacaggcgtgagccaacgcacctggcctcatcttgttttttttttttttttttgagacagagtcttgctctgtcgcccaggctggagtgcagtgactcagtctcggctcactgcaagctctgccacctgggttcatgccattctcctgcctcagcctcccgagtagctgggactacaggcacccgccgccacgcccagctaatgttttttgtatttttagtagagacgggatttcatcgtgttagccaggatggtctcgatctcctgacctcgtgatctgcccacctcggcctcccaaagtgctgggattagaggcgtgagccaccgcgccctgccacatcctgttttttttacaacagggtgtcactctgtctctcacccaagttagagaggagtgacacagtcttagctcactgcattctcccaggcccaagcaatcctcctatctcagcctcccaagtagctgggactttaggtatgtgtcaccacagttgactaatgttttaatttttgtagagatggggcctccacatgttgcccaggttggccttcctgggctcgatcctcctgcctcagcctcccaaggtggtgcatgcctacagtctcagtagattagaatcaccctaaccctcagtaactgagattgtaggcacgcaccacctcactgactcacctcaaactctcttttttgagatggagtctctgtcaccagactggagagcagtggtgcgatcttggcacactgcaacctccgcctcctgggttcaagcgattctcctgcctcagcctctgtagcagctgggactacaggcatgcgccactacgcccggctgatttttgtattttttagtagagacggggtttcaccatgttggccaggatgatctcgatctcttgacctcatggtctgcgcaccttggcctcccaaagtgctgggattacaggtgtgagccactgcgctcggcccatctcaaacttttaataaggctcttcgtatagaaatttttaaaaaattaaaaacatttttggccaggcttagtggtttaagcctgtaatcccagtgctttgggaggccaaggcaagcagattacatgaggccaggagtttgagactagcctggccaacatggcgaaaccacgtctctactaaaaatacaaaaatttgggcaggtgcagtggctgacacctgtaaccccaacactttgggaggctgaggtggatagatctctcgagttcaggaatttgagaccagcctgggtaacatgaggaaaccccatctctgcagaaaatacaaaagttagctgggcgtggtggtgcatgcctgtggtcccagctactcgagaggctgaggtcaggctgaggtgggaggatccctggagcctgggaagcggaggttgcagtgggggatgaaaaagaataccccgtgtccaaatagcaaaacactctgaaatgaggcaaaccgtggtttgttgaacaggtgttctgggacaaggttgccgaatatgcattagccgtaatccccaggacagccatgcagggtgggtcttaaacagttttttagattctcgagtataaaggtataatattgaagaataagcacaaataatgtcatcatacatgttaaagtgacaacacaggatttacaaaattacccttttttccccaaaattacctcttacgatgtggtttctgttggtgctgttttctcttgcatcatcccgccaggttgggtaaccctaactgattgtcaccagcagaccaacagacagactcacagcatccttctccctggtgtgagcactgcttaattcacatttatgaaaatactttaagacaagggcactgtaactcacatagaatctgaagtggccttgaacagggagctggtccagctgcctcttagtgtgtctgacctccaggtgggcggactgagatgcgtgcaggtgttcatggtataggcatccttgtaaacctgctctggttaaggataaataggcaaagttgtgctaatgctgttcctacagcagcctttgccctggactgactccagaacagctggctgactgacagctgcctcccagtaaagccttaaacaggcttatcttatatttttaaaaggcaaaggacaataaggcagattaataaactgtgggggtttttttgtttgtttttgtttttcttgagacaaagtctcgctgttgtaccccaggctggagtgcaacggcgcgatctcggctcactgcaacctctgcctctcgggttcaagcgattctcctgcctcagcctccagagtagctgggattacaggtgcccgccaccacgcccggctaatttttgtatttttagtctagacgggggtttcaccatgttggccaggctggtctcgaactcctgacatcaggtgatccgcctgcctcggcctcccaaagtgtcaggattatagggtgagccaccgtgcctggcttttttttttttttcctgtcttttgtgtatgtgatggggtctcgctcttgtcgcccaggctggagtgccatggcacgatctcggctcactgcaacctctgcttcccgggttcaagtgactctcctgcctcagcctcctgagtagctggaactgcaggtgtgcaccaccatgcccggctaatttttgtatttttactagagatggggtttcaccatgttggccaggccgatctcgacctcctgacctcaagtgattgacccacctcagccttccaaagtactgggattgcaggtgtgagccaccacacccggggctggatttttttgttttaagagacaaggtctcacactcttgcccaggctggtttacagtggtgcagtcactgcagccttcacctctgggctcgagtgatcctcccacctcaggttacaggtgtgagccaccacacatgaccgcacatggcagattttttttttttttttttcacggagtctggctcttgtcacccaggctggagtgcaatgatgtgatctcagctctcactgcaacctccgcctcctgggttcaagcaattctcctgcctcagcctcccgagtagctgggattataggggcgtgccaccctgcccagctaatttttttttttttctggagacaaagtcttgctctgtcacccagactggagtgcaatggcaccatcttggctcactgcaacctccgcctcctgggttcaagcgattctcctgcctcagcctcccgagtagctgggattacaggcacgtgccacctcacctggctaatttttatatttttagtagagacggggtttcaccatgttggccaggctggtcttgaactcactgacctcaggtgatccgcctcagcctcccaaagtgctgggattacaggcgtgagccactatgcccggcccaggattttttttttaattaaggaaaatactttttacatctaaaattctacgcgacaataattaatgtgtcttcaagctgagaattaattaaaatatagccaataaaacatgtattaagctttgtaaactttgtctatatatgtacttattttacttttatttaaaaatatggggccaggcacggtggctcacacctgtaatcccaccacttcgggaggccaagacgggtggatcacttggggtcaggagtttgagaccagcctggccaacatggcgaaaccccttccatctctactaaaaatatgaaaattagccaggtgtggtgcaggcacctgtaattccagctactcaggaggctgaggcaggacaattgcttaaacccagaaggcggaggttgcagtgagccgacattgctccactgcactccagcttgagcaatagaaagactctgtcttaataaataaattaatagccgagcacgctggctcacgcctgtaatcccagcattttgggaggccgagacgggcagatcatgaggtcaggagatcgagaccatcctggctaacacgatgaaaccccgtctctactaaaaatacaaaaaaagccgggtgtgatggtgggcgcctgtatatagtcccagctactcgggaggctgaggcaggagaatggcgtgaacctgggaggtggagcttgcagtgagccgagatcgcgccactgcactccagcctgggtgagtgatcgagactctgtctcaaaaaaaattaattaattaattaaaatatgacagtggcctgggtgccatcgctcgcacctgtaatcccagcacattgggagtctaaggtgggaggatcacttgagctcaggagtttgcctagcctgggcaacttagggagatcctgcctctacaaaaaataaaaaattatccaagtgtggtggttgcacacctgtagtcccaactacttcggagggttgcaggagtccaggaggtcaaggctgccgtgaggtgtgattgagccactgcactcctacctgggtgatatagtgagactctgtctctaaaataaaataaaataaaataaatgacagtggtccatatagtaccttattcagaaaaggcttgatgtacaagaaaataagttatttgtgatcaggacagagaagaattactgccttttgtgaaatggatgctgagaatcagttacgatgtacggtgcttgggaggctgactttgatttcagttacagccctgctgatccttagcacggtgactgcaaataggttactccaccttcctgagtctcagtcttcttagccgaaaagcacagatcatcatcataatagctaacattaactgtgtgcctggcatagggtctgaccgctttattcaagccagctcccagacataccttgctggactgtttaatgcccattcgacaaagaggagatcgacatggggaggtgttgagtaacttgcctggccactgagtccctgtcaatggcagctcagacaggtgaccccagagctaccctcccaccccctgaccaggcccgtctcacaggcctcttaggaagggctctgttcagtagatggcaggcacgtggtaagtgtttcctaagctgcagctgctgtgtagataaaactcaaagcagatatcacaagttttgtcagatcatactgtctcaattttgaggtgaatgcatgtgttttactacttaactacctctgaaatttaggggttttttgtttgttttgagacggagtctcgctctgtcgacaggctggagtgcagtggcgcgatctcggctcattgcatcctctgcctcccggcttcaagtgattctcctgtctcagcttccccagtagctgggcctacgggcatgtgcaccatcacgcctggctaatttttgtatttttagtagagtcggggtttcaccaggttggcgaggctagtctcgaactcctgagctcgtgatccccccaccttggcctcccgaagtgctgggattacaggcgtgagccactgcgcctggccctgaaatttcgcatgttttacggttggcttgttagggttaaattggtgcaccttatacttggttgcatactagactcactggaatgatttgactttcgtcatagttgcagaggcactctgaaaccctatgtatgtgcttcaccagggacagccccacgcatgggaggtggtggccagccatcaccccagggtgaatttctctaagagcagtcctaggccagggggtgagtgtgggaaagtcagggccgtttccatcagttaacgtttcagagcgggttcccgctggaagtgctggaaatacccagatgccatctgtagcattttatgaactgtggcggatccactctctgtgtcttgagcttctgctctgtggtctgctcagtggaagcatcctgtcagtccactgtacagtggggtggagccgcagccagggtgggtgtgccgtttgattggtcacggaatgaacagggcaaaggtcactaagtagatatgatactgcaagtaggattgtggtcataggtatttttatgaatttgtgttatgtgaagttgaggatttgaatgttgtgattattatatccagataaagttctagcctggcacagtgcaggcacgtgcctgtggtcccagctgcttgaagtgggaggagagcttcagctcaggatttccaggctatagggagctgtggtcccaccattgcaccccagcctgggtgacagagtgagaccccatctcaaaaagaaaagaaaagaggctaggcgcagtggctcaggcctgtaattcaagcactttgggaggctgaggcaggcggatcacttgaagtctggagttcgagaccagcctggccaacatggtgaaacccccccatctctattaaaaatacaaaaatcatacttacccggcaggggagataccatgatcgcgaaggtggttttcccagggcaaggcttagccattgcactccggatgtgctgagccctgcgttttccccaaatgtgggaaacttgactgcgtaatttgtggtagtggagggactgtgttcacactgtcccccccgcccaaaaaaataaaaatacaaaaatcagtcgggcgtggtggctcacgcctgtcatcccagcactttgggaagccgaggtgggtggatcacctgaggtcaggagtttgagaccagcctggccaacatggtgaaaattgggaggccgaggcgggcggatcccaaggtcaggagatcgatacatcctggctaacacagtgaaaccccgtctctactaaaaataaaaaaaaaaaaattagccgggcgtggtggcgggcgcctgtagtcccagctactcgggaggctgaggcaggagaatggcgtgaaccagggaggcggagcttgcagtgagccgagatggcgccactgcactgcagcctgggcgacagagcgagattccgtctcaaaaacaacaacaagaacaacaacaaaaaattagccgggagcagtgatgcgtgccgtagtcccagctactctggaggctgaggcaggagaatcacttgagcctgggaggcagaggctgcagtgagccgagattgtgccactgcactccagcctgggcgacagagcaagactccgtctcaaagaaagaaaaagaaagaaaaaagtcttccccgtgagagtagatttctactgaatcgattgctggttttatgccttttcttccgtgataggaagtatgtccagactcatctggctggggatcctcaggagagcctgcggggggcagcagaggcccgcctgggccagggcgtgcaccagaccagaatcctgcggatttagtattgtgagggtagaagaccagcaagcagcatgacctcgtggttactgatcttatgaagaacacttgtctttcatatttgggactgtgttaaggttttctggaatatttttggttgtagtaacgattctgctttaggagctttcttctctagtgttgcacagacctgagtgatttgaccagcagtgctgcggtaacggaagaccactcgtgtcttcagactcgttctgttcctgggggtgcttgcttgttctaggccccctttgtatggagaggttcaaaccttgattgaatagtcgctacccaggtgtcataacctgtggcctcattggtgtcacctggactttttgtctgctgtttgcaccatcgaaagtgatgtgcgctggccgggcgcggtggctcacgcctgtggtcccagcactttgggaggcgggggtgggcagatcacaaggtcaggagatggagaccatcctggctaacacggtgaaaccccatctctactaaaaatacaaaaattagctgggcatggttgcgagtgcctgtagtcccagctactcgggaggctgaggcaggagaatggcgtgaacctgggaggcagagcttgcagtgagtggagatcgcgccactgcactccagcctgggcaacagagcgagactccctctcgaaaaaaaaaagtgatgtgcgcttgggactgggagggcgaggcccgaggtacctgggtgcccgatgcccaggagggcatgagtgtcgtgttggataacctgctctccaagtaatagggttttgagaatgtttttttttttttttaattgagacagagtctgactctgtcgcccaggctggagtgccatggtatgatctcggctcagtgcaacctctgcctcccaggttcaagcgattctcctgcctcagcctcccaagtagctgggactacaggtgcccgccaccacacccggctaatttttgtatttttagtagagacgggggttcaccatgttggccaggctggtctatctcctgacctcatgatccgcctgccttggcctcccaaagtactgggattataggcctgagccaccatgcccggcctgttcaattctttgtattcaaatgtatatctggagttattttgttcaacttctgatctgcttttctttttgaattactgtattctaagcatcagtttacaagaaaaaaaatctttattaggtttccagacccaagtcaataccaataaaattaatgcagcaaacattcactgaatgctctattaggacctggggcagtagatgagtctgtgaattaaaagggcttcagcatgtggggtttggttttgtttctctgtagctaatcatacctttggaatggttttatagtttcaggaaaccgtggttctgggcagggtggcagctatgggttgaggcagttgatccttcctcaggtgtggccgctggtcttgttgcttcttgacattaactttgtgactcacgagggcaggcgttcgttttctgtggcactctgtgtgtgagcgagcatggggcttgttactgtgtgaaaagggccagctgccctgcctgtctgctcctccctggctcggccgggcgctgccatggctccagctcagattcacttcctctcgtacttggatgcttggtgatggtcgtggaagcagttttattttctcttgctgttctcgtgttgcgttaagctcagcatcactgttgctttttattcttagaattaaggaggaaagctgaaatcttttggggatttctgtgtttccagggactttaggaattcttttttttttttgagacagggtcttgctctgtcaatcaggctggagtgcggtggcgcgatctcggctccctgcagccttgacctcctgggctcgagtgatcctcccatcccaaccacctgagtaactgggaccacaggtgtgcaccatcacgcctggcgagtttttgtatttttttttttaatagagatggggtttcaccatgttgcccagaatgatcaaacttctaggttcaagcagtctccccacctcagccttccaaagtgttgggattacaggcatgaactgccatggccggctggaaagtctttacatttgaaattcattttaagttaggaggaaaggcctagcacactggctcatatctgtaatcccatcactttgggaggctgaggtgggcggatcacttgaggccgggagtttgagtccaacctggccaatatagcaaaacctcatctctgctaacaatacaaaaattatctgggcatggcggcagatgcctgtgatcccagctactcgggaagctgaggcaggagaatcgcttgaacccgggaggcggaggttgcagtgagctgaaagtgcactactgcactccagcgtgggcgacagagtgagaatcggtctccaaaaaaaaaaaaaaaagagtaaaggtgagggacacctgtgatgtggcacacagcgtcttttctctagcttgctttgttgactcttgtttataatttcttcaaatgtatttacagagttaattgggttttttttggaatagataatatctattccaaataaaaatccagaaatacacattcaaactgtggggcttttacccttttaactgtgttccaagtccctgtccctagcatgctctgattgtcagtccttcccttgcctgacctacctgtctgagtatcctttggcagtcaggtttttgtttgtttgtttttgagacggagtctcgctctgtcgcccaggctgcaggctggagtgcagtggcgtgatctcagctcactgcaacctccaactcccgggttcaagcgattcttgtgactcagcctcacgagtagctgggactacaggcgcctgccaccacgtccagctaatttttgtattttttagttgagacggggtttcaccatgttggccaggatggtcttgatctcctgacctcgtgatctggccaccttggcctcccaaagtgctgggatgacaggtttggccaccgtgcccggccggcagtcagtttttacatggttcatcacagattttaaattaagattccccagcaggataaaagaaatgccagttgtattttatttttcgtatttgtatttttagcaattttttttttttgtatagaatgagccaagggcatctagagcaaagaggtagttccctgccccgtctccatctccctgtctgcactgtctctcccagaggtgtttgctggtgccttctttgcagttccctgtgctgtgtcatgcccgtttgctgacccagcccctgctgtgtcttccccatcccagtgtgactgtcgctcttggtagttcctccgtgtttcctttgtttccttaggtgacttgtctttgccccactccctgcagtccgcagcacctgttgtctccttccctctcctcccgcttctcctcagacgtcatctgttctttctagagttgttccccttgccccagggtccagggttcctaacagcctgttttttttctttctttttttttttttagtgagacagagtctcgctctgttgcccaggctggagtgcagtggtgcggtctcagctcactgcagcctctgcctcctgggttcaagtgattctcccgcctcagtcttctgagtagctgggactataggcgtgcactaccatacctggctgatttttgtatttttattttttatttattgttgagacagggtctctttgttgcccaagctggagtgcagtggtgccatcttggctcactgcaacctccacctcctgggttcaagtgattctcctgcctcagcctcccaagtagcttacagtagggattgcgggcacctacgaccacgcccagctaattttgtatttttagtacagatagggtttcaccatgttgaccacctggtctcaaactcctgacctcaggggatccgcccaccttggcctcccaaagtgctgggattgcaggcgtgagccaccgcgccaggccctaacagccaccttcttagcatctgtatattcagaccgtccattgcaggatgtgtgatctttgtggcctggaatgtctctctctgagcactccatcctcccacccctcaggcagtgtctcttgaggccacctgcccagccaccatcttggggggaccacaggaggctggggagagagcgaggcagtagtgagaagccgggacgctcaccgttggccgagtaccttagagcagccctgacgcctgcttctgtctcttggtgaaagtggcgcccagacttcagtccttacagcccagaactcagaaccgtggaggtgctgtgacccacagggtttaccttgtaattgttgttaaaacccttctgggcttcataatggaatgcttatgttgaaatattattttaagtactattatctatgatgtggttagaaatgccaaagaatttttagcttttttgagacggagtcttgctctgttgcccaggctggagtgtagtggcgcgatctccgctcactgcaagctccccctcctgggttcacgcgattctcccgcctcagtcttccgagtcgctgggactacaggcgcctaccaccatacctggctaattttttttggtattttttgtagagacggggtttcacgacgttacccaggatggtctcgatctcctgacctcgtgatccacccgcctcggcctcccaaagtgctgggattacaggcatgaaccaccgtgcccggcctttttttttttttttggtagatggagtctcgctctgtcgcccaggctggagtgtggtggcgtgatcttggctcactgcagcctccacctccctagttcaaacgattcttctgcttcagcctgctgagtagctgggattacaggcacctgccaccacgccctgctaatttctgtatttttagcagagatggggtttcactgtgttgcccaggctggtctcaaactcctgacctcaggtgatctgccctcctcggcctaccaaaatgttgggattacaggtgtgaaccaccacgcccggccagagtgtgtagcttttgtaaaagttttggaaatggcctcagataatttcagaggtttttaaataaagaacgctcaaaatggagcaaaatggagagcccctgataggcctcctgcgtggaggtttgcagtaagccagaggcacctgtgggtcccagggagagacgggctgctccatggatgctcctgggacctggggcactgggtgggcctcaggcagataggagctggtccgtatctcttgccaagcccaggccaactcctgatgaagcagattcctgtgggtgacaagtgtcagaagatagaataggaccttagggtcaggaaggatttcttgaacaaaaaaggggaaaaacagattgagagattcagaaagctgtaatatattctgtgacctcaaaggtgacttggaggagggctgttgttcagcgacgggcgtgtagtgaacactggggcatttaaacggttcagatgctgaatttaatgttatatgttttttactacaattggtaaaaaaaaaaaaaaaagcttgtgctcatcaaaagacacaccataataagtaaaaaaagaactgtgaactggaagatacttgtaacatttttaaccagtgaagggtcggtgtcctggatatgtccactgggcaccacagacagaacggccttgaaggtaggctggagacgcctacccttatcaggccaggcaagcactggggagcctggccgtaccagtcattgttgaggctgcaggaatggcagggagccctaagttccagtggccactggtgcagtcctcagagagcagttggcacaccgcctcaggctgagcctgcccattcttgggcacccagaagttccactcttaggtatacaccagaagaattcttcctcgactgtttgtgctgaaggacaaggtttaagtttttaaaatttccagtgtcacagactgatgatatttttgtaaactacaacaaaagtgactagctagtaaaggaaatcacagaacataaaatacaaacccatgtcattattattaatattttgaggcagagtctcgctttgtcactcagactggagggcagtggtgcgatctcggctcactgcaacctctgcctcctgggttcaagcgattttcctgcctcagcctcccaagtagctgggattacaggcgtgcaccaccatgcctggctaattatgcctggctaatttttgtatttttagtagagatggggttttgccgtgttggtcaggctggtctcaaactcctggcctcaagcaatctgcattcctcagcctccaaaagtgctaggattccgggcatgagccatcatgcctggttatcgggggaacccgcccccaatatttcaatgtaggttctttctattttccataagtgtcggccagctgagaaataaagagaaagagtacaaagagaggaattttacagctgggccccccgggtgacatcacatatcggtagggccgcgatgcccgcctgagccacaaaacaagcaagttttattaaggatttcagaaggggagggggtgcaagaacagggagtaggtcacaagatcacatgcttcaaagggcaaaaaggagaacaaagatcacaaggcaaagggcaaaagtggaactcctgataagggtctgtgttcagcggtgcatgtattgtcttgataaacatcttaaacaacagaaaacagggttccagagcagagaaccagtctgaccaaaaatttaccagggtggggtttcccaatcctagtaagcctgagggtactgcaggagaccagggcgtatttcagtccttatctcaaccacataagacaggcactcccagagcagccttctgtagacctccccccaggaatgcattcctttcccagagtattaattcttgctaggaaaagaatttagtgatatcttccctacttgcacgtccgcttataggctctctgcaagaagaaaaatatggctgtattttgcctgaccacacaggcagtcagaccttatggttgtcttcccttgttccctgaaaatcacgattattctgttctttttcaaggtgtactgatttcatattgttcaaacgcacgttttacagtttgtacagttaacacaattatagtggccctgaggtgatgtacatcctcagtttatgaagataacaggattaagagattaaagtaagacaggcttaagaaattatcaaagtattatttggaaactggtaaatgtccatgaaatcttcacaatttatgttcctttgccacagctccagccggtccatctgttcagggtccctgacttcccacaacacctggcttctattacttttttaaaattagcttttttctttttttcgagatggagtctcactctgttgcccaggctggaatacatggtgtgatcttggctcactgcagccgccgcctcctgggttcaagcgattctcttgcctcagcctctcgagtaactgggactgcaggtgcaatacaaaaaatgcagaacttttgtattttctgtagagatggggtttcgctgtgttgtccaggctggtctcaaactcctgagctcaagtgacatgcccaccttggcctctcaaagttctgggattataggcatgagccactgcatccagccttattattattatttttttttgagatggagtcttgctctgtcgcccaggctggagtgcagtggcgcgatctcggctcactgcaacctctgcctcccggattcaagcgattttcctgcctcagcctcctgagtagctgggactacaggcatgcgccatcacaccgaggtaatttttgtattttttggcagagacagggtttcaccatgttgaccaggctggtcttgaactcctgacctcaagccatctgcccaccttggcctcccaaagttctgggattattttttaagcagttttgataggtgtgtacctagtagtgctctgtggtttaatttgcatttcccagggagtgggggcactgcctgtcttctcacgcctcagttgcttgttgctgtgacggtcgcccactcctcctgccagtgtctgtgctgctcacggtagctgcatcagcttcacgctgtccgcccttcgccacccaccgcgcctgctgctcaggaatgttccaagcaacttggtggtaacagaagctgagaacagcccagatgtccttcggtgcaagagtggatggatcagttgtggtctattcacagaatagaatgtgaccacactggagatgaatgaattgtagctacaatctgcagtgtagacgaatcttaggaacgtaggcgtttcagaagcagatcaagccaggcacgatgctgtgtgcctatagtcccagctactcagagcctgaaggtgggagatcacttcagcctgggagtttgaggccagcctgggcaacatagcaagaccctgtctcaaaggaaaaaaaaagcagattacagaaaagtaaatccagtgctaggccgtatttttaagctcaaaaaattaaaactaattagcgtttagggataaacatgaggtaattttttagaagcaagagaatagcattgaatttaaggtatatatggggaaaatgaaacttccaagttattgataattttccagtttttaaattagagacgggatcatggtgtttatgcgtcataatttatatgttccatatattttttgttgtttttttgagacggagtctcgctctgtcacccatgctggagtgcagtggcgcgatctcggctcacggcaagctctacctcccaggtttacaccattctccgcctcagcctcccgagtagctgggactacaggcgcccaccaccatgcctggctaatgtttttgtatttttgtagagacggggtttcactgtgttagccaggatggtctcgatctcctgaccttgtgacccgcccgccttggcctcccaaagtgctgggattacaggcgtgagccaccacgcccggctgatatgttccatatatttctttctgtatttcacataatacatagtaaaatatttaaaacagaacaaaaatagacttccttttaagatgttttcatatctgttcttacaaagttggccacagtttttccccaacagtagtttgagttcagcagcagctcttttataaaacgtttgctgcacacactgagattgcacctggaagtacagaaataagaacacacgtattttattttatttttttacccctgaagatctttaagtcttctgaggagcatggacctgctagactgcaagctgctgcattctgaggagcagggacctgctaaactgcaagctgccgcaggcggagatttttgcctgtttggtttattttgttaccactgagtccccagctctgagaacagagcgaggcatgtgatcgatgcatcgtaactgttgagcaaatgaatgctgagctgtgatggcaccgacgtgtccggggagaggacgcacccggctgtgtggacatgtgcccagggcccaggacagcgccacggaagaggacacacccggctgtgtggacatgtgcccagggcccgggacagcgccacggaagaggacgcacccggctgtgtgcacatgtgcccagggcccgggacagcgccacggaagaggacgcacccggctgtgtgcacatgtgcccagggcccgggacagcgccacggaagaggacgcacccggctgtgtgcacatgtgcccagggcccgggacagcgccacggaagaggacgcacccggctgtgtggacatgtgcccagggcccgggacagcgccacggaagaggacgcacaggacagcgccacggaagaggacgcacccggctgtgtgcacatgtgcccagggcccgggacagcgccacggaagaggacgcacccggctgtgtgcacatgtgcccagggcccgggacagcgccatggaagaggacgcacccggctgtgtgcacatgtgcccagggcccgggacagcgccacggaagaggacgcacccggctgtgtgcacatgtgcccagggcccgggacagcgccacggaagaggatgcacccggctgtgtggacatgtgcccagggcccgggacagcgccacggaagaggacgcacccggctgtgtggacatgtgcccagggcccgggacagcgccacggaagaggacgcacccggctgtgtggacatgtgcccagggcccgggacagcgccacggaagaggacgcacaggacagcgccacggaagaggacgcacccggctgtgtggcaggggaggttcccaagagcaggctcagggctctggggtctgagtgagggctctccagccagcagggagcagggcagggtgttgaagagacggcaggtgcgtcaggggctgacgtgggacccggcactctgtgctctgtgtctgcccgggaacaggtagtcctgcgtcggaccgggaagtgtggtgggtgtggtgggggaaggggctggcgtcagcagggctctcgtccgccaacgtctggtggggatgcccgccatgcgggggcctcaggctacagccagggctgtgaaggagccgaggtcatagagtggctgccctggcgtagggagggaggacacgggtccccgccatttcagaagctcagcgtccctgcacgtgtgcggtcttgtctgcctaggcatgtgtgcgggccctggggctgctgccagcagaacggactgggatacgctggatttgtaaaacgtgaccctttttgtttgcttttaatttttaatttttatttatttatttatttttgagactgagtctgactctgtcacccaggctggagtgcagtggtgagatctcggctcactgcaacctccccctcgagggttcaagcgattctcctgcctcagcctcctgagtagctgggattacaggtgtgtgccaccacacccagttaattttgtatttttagtagagacaggttttctccatgttggtcaggctggtctcgaactcctggccacaagaagcaatccacctgcctcagcctcccaaagccttgtttgcttttttttattttgttttgttttgagacggagtttcactattgttacgcagactggagtgcaacggcacggtctcagctcgctgcaaactccacctcccgggttcaagtgattcttctacctcagcctcctgagtaggtgggattacaggcatgtgccatcacgcccggctaattttgcatttttagtagagatggggtttctccatgttggtcaggctggcctcaaactcctgacctcaggtgatccgccctcctcagcctcccaaagttttgggattacaagcttgagccaccgtgcccggccaccttgtttgctttttaaagataatgatgtcactaaaagagttctgactgaggccgggcctggtggctcacacctgtaatcccagcactttgggaggccgaggctggtggatcacgaggtgtggtgatcaagaccatcctggctaacacggtgaaaccccgtctctactaaaactgcaaaaaattagccgggcgtggtggcgggtgcctgtagtcccagctactcaggaggctgaggcagaagaatggcgtgaacccgggaggcggagcttgcagcaagccgagatagtgccactgcactccagcctgggagacagagcgagactccgtctcaaaaaaaaaaaaaaagagttctgactgaaggttggaacttagccctccagaaatgaagactgcgaataacgctgatggcagctcgtcacttgcagcaggttgcagcacgtgctgctcgtgtagctgcggctgcacaccaggcctctcctttaactgtgttataacctttctgttgacatgggatccccttgaaagttttttttttggagacagggtctcactctgtcacccaggctgacgtccagtggtgcaatttcagttcactgcaacctcctcctcccgggttcaagccatcctcctgcctcagcctcccaactagctgggattacagatgcacaccgtcacacccagctaatttttgtatttgtagtagagatgaggtttcaccacgttggccaggctggtctcaaactcttgatctcaggtgattcaaccacctcagcctcccaaagtgctggaattacaggcgtgagccaccactcccggcccccttgaaatttaaaccaagtttaggaagaatgaagttgtgaggtgctacttcaaacatcaggtggcaaactcccggactcattaccccaaggaaataggcagtccaggttggtggctcacgcctgtaatcccagcacttcgagaggccgaggcaggcgggtcacctgaggtcaggagttcaagactatcctggccaacatggtgaagcccatctgtactaaaaatacaaaaaaattagctgggtgtggtggcgcgcgcctgtaatcccagccacttggcaggctgaggcaggagaatcgcttgaacctgggtggtggagggtgcatggagccaagattgcaccattgcactccatccagtttgggtgacagagtgagactctgtctcaaaaaaaaaaaaaaaatagacatcagaaagggttggctcctgtgatctcggcactttggtgaccatgacccaaggcaggaggatcacttgagccaaggaattcaagatcagcctgagcaacatagaccccgtctctgcaaaaaatttctaaaaacttagctggcatggtggctcacgcctgtagtcccacctattcaggaggctgtgttgggaggatcacttgagtctgagaggttgaggctgccatgatcccttatcacaccactgcattccagcctgggtgacagagcaagaccctgtctccaaacaaacaaaaaagcaaaaaatggtgttttacctaggtatttaccatttccagtggtcttcattcctttctaaaaatctaggttttagccggacatggtggctcatgcctgtaatccccagcactttgggaggctgaggcgggtggctcacctgaggtcaggagttccagaccagcctagccaacatggcaaaacccaatctctactaaaaatacaaaaattagccaggcgtggtggtacgtgcctgtagtcccagctattcaggaggctacggcaggagaatcgcttgagcctggaaggtggaggttgcagtgagctgagattgcaccactgcactccagcctgggcaacagagtgagactctgtctcaaaaaagaaaaaaaaaagaataagtcacattttggtgaggagcagtggcttgcacctataatcctggcactttgggaggctgaggcaggaggatcacttgagaccagcctgggcaacaaagccagaccgtgtctctatagaaaattttaaagttagctgggcatggtggcacattcctgtagtcttagctgcttgggatgctgagaagggaggctttcttgagtccaggatttcaaggctgcagtgagccaagatcgcaccactgcactccagcctgggcaacagagaaaaaccttgtttctaaaaaaaaaaattaggctgggtagggtggctcacacctgtgatcccagcactttgggaggctgtagcaggcggattgcttgagtctgggagtttgagaccaacaagatcctgactctataaaaattttaaaaaatagctgggcgtggtattgcacacctgtagtcccagctactcaggaggctgaggtggggggatcagctgagcccaggaggtcaaggttgcagtgagctgaaatgtgaccactgcactccagcccgggcaataaagtcaggcggggaaaagaaagaatgagttaacattttctcagctttatgtgttgagtgattttggattctatcctgaaatggtaagaatgaaaagaaaatctgccaagtccatccgttcctacactctcactgcctccaagtcattctgcgctcttgagccagaacgacctggccgtttttaaaaatggagttttttgccttagtaattgacttgtgtaagagttctttattccacttgtgaattgttttttatacgtacataatgtaaatattttctccccttctgtgcctttcagtatgaatctatctgaactcgattctgctgttgtgtgtgtgtcttttcctcagtaccagatggtcttgattactgtagatatatagtatatgtcttgaaatcaatagggtaaattctctaacttttgttctttttattaatgttgctgtggctaatctgtctgctacatttccttatacatttaaaaaaatcagtatcagtttctgcaaaaaaaaatcctcttggattagggttaggcttctgtcaagtctacagatcagtttggggagaactgacttctttatatcgaggcttctaatccgtgaacatgaggaatctttttcttatctttagtatcttagcaatttgtggttttcaacgtacagatttcataggtcttgttatttctttttctttttttgaaacaaggtctcactgtgtcacccaggctacagtgtggtggcacgatcatggctcactgcagcctcgagcttctgggctcagccatcctcttatctcaacctcctgtgtcactaggaccacagacatgagccaccatgcctatttaacttaaaaacaaaaacaaaaaaccgggcacggtggctcatgcctgtaatcgcagcactttgggaggccgagggggggattgactgaggccaggagtccgtgaccagcctggacaacatggcaaaaccctgtctctaaaaatacaaaaattagctgggtgcagtggtgcgtgcctgtagtcccgtgcctgcggcatgggaatgggttgagcctgggaggcggaggttgcagtgagttgatgacttaggatttttcttctcggtcactttgcaagccggggacccctggccagtgatgccccacctgggccctgcttggccacactggcgtgccccaactcacctgtgttatagcttgtactgtgttcggccattcccgagctcatgtaccgcactcaagatcaaggatacactggacattgaagggtgaggagggcggagaagaactttattgagcagtgaaacagctttcagcggaccaggggatgcaggggtggttcccctacctgaaggcaggaaagtccgcctgtgtggctgggtctggggctttttatggactcaggatgcggagtgcttgcagagcttgctgatgggtttgtgagtatgcagaaaaggttaaagtgggcatgacagtgtagaaaaccaattataagaggccgggcacggtggctcacgcctgtaatcccagcactttaggaggctgaggcagacggatcacaaggtcaggagttcaagaccatcctggtcaatgtggtgaaaccccatctctactaaaaatacaaaaattacctgggcgtggttcgcgtgcctgtagtcccagtgacttgggaggctgaagcagaagaatcgcttgaacccgggaggcagagattgcagtgaactgaggtcacaccactgcactccagcctgggcaaacagagcgagactccacctcaaaaataaaaattaggaaagggtaggtatgtgtaaaataggtgaaggatggggatcaatcagaggaaagtgtggcaaacaggaaggcaagttcttcatctagtctgaggatttaacttgtagctcagctgtcaggctttaaactgtctttggcttggaggtgggtttcaccgggaacccgccccatctgcctggcattcagctgcctcctgccagtatcaccgagatcgcgtcaccgcactccagcctgggcaacaaagcgagactatctcaaaaccccatattgatgtcatttcctaaatatttggttaaaaaaaaaatctgggcctggaattttatctggttttttttttttttttttttgagacggagtctcgctgtgtcgcccaggctggagtgcagtggtgcgatctctgctcactgcaagctccgccttccgggttaacgtcattctcctgcctcagcctcccgagtagctgggactacaggtgcctgccaccacttccggctaatttttttgtatttttattagagatggggtttcactgtgttagccaggatggtctcaatctcctgatctcgtgatctgcccgccttggcctcccaaagtgctgggattacaggcgtgagccacggcgcctggccttctggggattttttattacaaatataactttattaacagatgcaggcctattcagattttctatttcatgtcagtcttggtaaattgtaattttcaagatatttgtccatttcatctaatttttctaatttcttggcatgaagttgttcgtattttatccttttcacgcctctaggatctgtagtgatgtctttcctcatgttgctcaaagaaccaactcttttggctttgttgaagttatctgtttgttttcatggatttctgttccttatgatttccttgcttgcatttatgttgggtttatcctgttactttgtagcttcctgaggcggagccttaggccttgattaacgtgttgtactagtcagcattctgcagaggaacgttgccattatctgtgtctctttctaaaggagatttgttatgaggaattggcccacgtcattatggagacggaatctcatgctctgccatttgctgaagattgaggaaagcagtgggataataacagtccaaggacaggaggagacacgtggccccgctcaggctggcaggcgagaaggaaaacccaggccaactcctcctcccacccctttctattcgggacccccgtggactgggacgacactcacctgcacagggcagcgcagttggcttcatggagcccccagctcaggtgctgctcttaccaagaaacaccctcccaggcacaccctgaagtcatgtttcatctgggtgccccacgatgcagcaaaggagacatgaaattaaccgtcatgtacactgtatttattattcaattcaaaacattttctaagttcccctgggatttcttctttgagctacatgttagccggaggtgtgttgttgaatatcaagagtatcttcctcctgggtttccagtttgtagctaagtcagggatagtgctgtgtgtgacctcattccattacgtttattgaaaccagcttgaagccctaacatgtggcttgtcttagtgtacagcattcagttaaaaacaatgtgtgttctctagatgttgggtgttctgtgactgtcacgtcatggtggttgattagttagaaacaatgtagaaacaatgtgtatttgccaggcgctgtggctcacacctataaccccagcactgtgggaggctgaggcaggcggatcacctgaggtcgggagttcagcctgaggtcgggaattcaagaccagcctggccaacatggagaaaccccatctctactaaaaataccaaaattagctgggtgtggtggcacatgcctgtaatcccagctactcctgtgtgaggctgaggcaggagcattgcttgaaccggggaggcggaggttgtggtgagccgagatcgtgccattgcactccagcctgggcaacaagagcaaaactgtccccccccccaaaaaagaaagaaagaaactgtgtgttctctagatgttgggtgttctgtgaagatcaggtcatggtggttgatagtgttgttcagaacatcgatgtttttcctgatttttggtctgttctgtcgatttctgagaaagtattaaaattaaagttgggtcttgcatttttatccattctgtcagtcccttactttaattggagttttttgtccactaacattgaatttaattgttgatatgtttggatttagatcttccaactaattttctatttgtttcctgtgttgagttactttttcatttttcttgtaactttttagcttatacctctttgcattttttatgcagaggttgctgtaaggattacaatatgcatgtttattttaattaattaatttattttgtttatttatatatttgtttttaaggaacagggtccctgtctcctgggctccagtgcagtggagtgatcatagctcactgcagcctcaaactcctgggctcaagcggtcctcccgcctcagcctcccaaaatgctgggactacaggtgtgagcccctgtgccggcccacagtacacagctgcagttcttcaggatctcttggggtggccgtattctgccgtctcacacttctccatgccatggcgtctgtctgtgcacgtggcaaactccacaaggcagtgttggattcttttgctttgaacggtcttatggaataaagtccatcagctctgcccttggtactttcatctatactttgtgatactttctttttattttttcttctagaatagcctaacatggcagaccagagacagcgctcactgtctacctctggggagtcattgtaccacgtccttgggttggacaagaacgcaacctcagatgacattaaaaagtcctatcggtaagtggacaagtgtggcccccacatccccccaggaagacacacatgccccgtgtggtttagtctgcattttaccaagaaccattgcacatactttatcctggccgactcagcgttgaactggtcacagctcggtaacacctttgtatgtgtaatgtgctccttatagcttaaagttatggtattcatgttctcttgccaacaaaaaatagcacttagtagaaactgacacactgtccacagttccatagggagtcagggtctgaacctgtttgaggcctcacaggagccgcagagcgctggcatggtcctgtggtctccttgttttagcacagtgatgacagagacccctcactctgttgtggccttctgattgagcttgaagaactgcactcttgggtacagtttcattgagtaacctgtaagagacaccatcactaatccagacaattcagatagtcctcctctcgtgtgctagcatcgtgtagttcataaaacacttcttaaagtgccatcattacgccccgccgtgcttaccgttcacttggcacttgtgcagttagcggctgggacaccagggctggccttggtgccgctgaacttagatgtgccgtggcactcacagcccttggggctccctcctctgaggctgggtcagggtgaggaggtttacctgaaacaaccgcggagcttgcttttgtccctggcccctgcagccctggagagtcggacagtgaggtggcctgggtggacctgccttccactgcacccggcagtgcgtgcgggtgggatggacgcggcggcgggtgcgggtggaacaaagtccagggtagagccaggacatggttttggtttgcaggaagcttgccttgaaatatcaccccgacaagaaccccgacaacccggaggccgcggacaagtttaaggagatcaacaacgcgcacgccatcctcacggacgccacaaaaaggaacatctacgacaagtacggctcgctgggtctctacgtggccgagcagtttggggaagagaacgtgaacacctacttcgtgctgtccagctggtgggccaaggtgagggcgagctgcctgccgtgcgggcacccgagtcactcctgccgtgcgggcacccgagtctctcctgccgtgcgggcacccgagtcactcctgccgtgcgggcacccgagtctctcctgccgtgcgggcacccgagtctctcctgccgtgcgggcacccgagtcactcctgccgtgcgggcgcccgagtcactcctgccgtgcgggcacccgagtctctcctgccatgtgggcacccgggtcactccacgcctgcagggttcccagcattgcagagcccatgcgttgatgccagcaactctacactcctgagaaaaggcttctgggcatatggagcctttctcctcacctgtgtgatgggcgaagctctgtcactggcttggtgtcctgcctggaacaagccatagcgtacagattgtcccagggaagagccgtgcggagccgccagggtttcttctgtaaatggctcccagtccttcgtgagacaggaggaaataagcctcgatgttacatccgcatttcttcgtttcctcgttttgttccaaatgtcatatatgaggccagagggttggaatcactgcatggcatttgtgagaagcctgtatttggctttgactggtcggcctcctcactagaatccttataaagtactttttatttagttaatgttagacagagtctcgctctgttgcccagactggagtgctgtggtgagatcctggctcactttaactttgaattcctgggttcaagtgatcctcccacttcagctccagaactgcaggagttgaggcgtgaaccactgtgcccagcctggaggctgctttgttttttttttgagacggagtctcgctctgtttcccaggctggagtgcagtggcgcgatcttggctcactgcaagctccacctcccgggttcacgccattctcctgcctctgcctcccgagtggctgggactacaggtgcccgccaccacgtccagctaattttttgtatttttagtagagacagggtttcaccgtgttagccaggatggtctcgatctcctgacctcgtgatccgccagcctcggcctcctggagtgctgggatgacaggcatgggccaccacgcccgtcttggaggctgcttttctttaagctgcgggtttctttctgtctctcctcctcccttcttcagttctttccttctgcttcctgtctggaaggcagtatccccacctggaacgcaccccctgccttctgctgagggcatttgggagtcctgcgcctccctctccaggggcctcggaggccatgcaacaccaccttcttctccccccaggccctgtttgtcttctgcggcctcctcacgtgctgctactgctgctgctgtctgtgctgctgcttcaactgctgctgcgggaagtgtaagcccaaggcgcctgaaggcgaggagacggagttctacgtgtcccccgaggatctggaggcacagctgcagtctgacgagaggggtgagtgcccgccccagggcccgtgtgtgtgtgtggggcagagccagaatgggccctgaatggtgtcaacctgtcttgtcaaacaggagggcactgacactgtgccgcgagtgtttgtggtggcagctgggactgttgaggtgtgaacgtggaccctgaggtaaagcaggcgcatagagctgtccccgccgtgacctgcggtagccgtagatcccagggactgcgaggcggggcagggcggcaggcagttggggcggggctgagggccgagggctggcggtgacccaaggcgacggaggaaagccgtgtggggtggaggtcagcgagtagcctctcccggtggagagtttgtccaggtgcccgaaagtcgctccacaggaccagcgttgggtgcgcgccaggctgtggccctcgtgcagtgccctgtgtgcttgcttttcagaggccacagacacgccgatcgtcatacagccggcatccgccaccgagaccacccagctcacagccgactcccaccccagctaccacactgacgggttcaactaaatccaggaggagctgtggtcagaggaggagccggcgcctggccacgccaaccttagaatcatgaactgtagtcacagagatgggaaggcagcctcctgcctgccctggccttgctggggcccctcctgcctccacgcccacccagcgtcgacccttgacccacgaagtgcgtagcatgcagtatttaaagcagtgtagctacggtcttctgtttttttcccttttttaatagcatgtatggggttctgttccatgtctgtgttgtggacattccgcggcatgaccgcgtgaactgcacggtggagctgcctcagggctgtcggtcaggttggtccagtgaggggtgactgcagccggtcaggtgggcgaggagaaggggggctgcccctttcctacctgtgcttgaggggccggaggcaggtgctgcctggcagagctgtgttaccgtcttggcctcggggtctggtccacactctgtgctcccagccttgaggctgcagtaggactctgatctcacctgccagaagagaggcggggccgcgtcctcctggcgtcaccggcgtcactgtcattccttggtgtctgtgctgggcatggttggcttgggggtctgtggtttcctgggccttgtggcagggtttctcccgtgggagaatttggtgtggaaagcataggaggccccttccgaggttgacaccgtgtcctccgcggtgtttctcgcctggtcgtctcgtcgtgtggacgctgccgttctggttctcggaggtgtgtccttcgccgtgttggggttatttgtctgtgttcctgcacttttcccgggctctgagctggattgatggggccagtctcccccctcccatcttgaggtcgttctccacattccttccagcacacctgtcctttccatagccctttttggacctttagaaccacagatgataggaccagcccaatgagccacagtcagagagtagattgtgcatgtgtgagcacccagctactggggacgggggctctcccacgacccctcctcctgtgtttgccagagctcccatctgccccactcgcctttgccccgtcatcgatgattcaggcagagccagattcgttaggtccctggaggaaggactgactggaccagagggaccctctggctcaggagggttgggtccctgggaggccggcagccaggccacagaatccacacgtggaccattgtgggtccctgggaggccggcagccaggccacggaatccacacgtggaccattgtgggtcccttgggaggccagcagccagactacggaatccacatgtggaccatgggaagtcagtctcttgcgtgtcctagaccttgtgggtggcgccctgcataggggagcagggggaacgggtctgatgtccctgtgctggctgagggctcagagctgcccgcactccgtagctcatgggatgtgctgggcctgcctttggcgccatgctgcagactccagtgggcctggtttctgcagaatgtccatggtggccgctgcagagttgcagaggtccctgtagagataaagctgaggaggaggctgtgtgtgatggctctggctcggaccaaccagatgagcctcctgaagcccccttccctgcctgcctgctgacccgtggccccagctcactcattgccctcagcagccacccgaggctgtgcagaagggtaggttcaggttgaccaggaagctgccaaaagggacatggatatgaggatacatctggacgtgcttaggaacagggtgctggttgagggcccccagctgacccctactgcagatccgcatgtggaccatgagccggctgccagcactaggtcctgggcagctttgtttgtcccacttttctttgtttcttctcactaaaatgatcacgaagacctttgacaagaggagagatatgcactgtgatattaaattagaaataatttatcaaaatcagacctctcctaaaagaataagaaattcattgtttggcccatcctgaaaggtgaggtggcgagacagtggggtgcctccgtgccgcttcgtgcagcagcaagttcagcctgagatgctggctgtactcagcctttgcaatttttgtagatgtagcttaggacgtgagttatttttccgcagactggccaagagccaggttctaagcttggacctaaggtagaaagctgcccatcgggggccctagctcagccccaccaggccctctgttgggcctgcacacagctctgtggctagaacactccaaggcccttcggtacccatcagagtgggccccttgccaggtggcttttcagttacagagtccagtggaccattttgtagaaccatgcagctccctgcggaaggtggggtagggtgggaaagaggagcaggtctggaggtttgtggaacccagtcccctgcagaatctgtaaaacctaataaatcatggttgtggccattctcacggtggtgattgtgattagacgacccccgggaagcccagacactcggggcctggagttcctccccctgcctgacctagaagcagaaccgttttcagcgctctgccctgttggctttaaggctttgtcttaatttaaggaaaaagatcctcccgggttttatttctctctttcttgagtggactgtttccctataattaaaagaggtggtgagtcctggggcagcttccgcgcctccctgtccacgtgctaacagatcaggacgcccccagcacccctgcctgcttttgctggtggcagtgacgggaccccgactcctcactctcgggccgcagacaatgctgtgagcaagtgtggccatgggcacagaatgtccctttggacgccgctgctgggggctgccaggggccctctggggtcgtgctttgaggcccgtccggttcacgagggggtccgggcagcactgactgcttccgacctgcaggaggcgtaggagcggccctgcgggccctttcacggcagctgctgctgtatagatttgtctccactcagtgacgtgggatttttttgtcttccttttggctttatttttaaactgctttagatattactgctcagtgtttgtgaactttcctagttctctatgttgttagtgcagccagcacccagtggggacctactagaaaaaggaactggcatgcacacgtgcccagcaggaaaagcttcgtcttcacgtcggctgctgccatccagaagaggccctggagcctcacgccgtcgaggctgctctcaggcgttctgttccgggcgaggcttgtgctgcaaggaagggcaccagcatgcaggctgccactggagggtccgggtgctgcgggcagagttcagcgcttgtccaccctcccttagctctgactcagtgcatcctactgtggggacatctcgtgaggggacacgaaatgactgatctcaccctttcccagtattcagagctgtgaacccctgtggcgcaggactggcctgtgtctgttattttggttgtaaatcattctcctgtggaattggcaaaagctacatttttactgtccttaccagcaacagtttgcgtcgtcacatgctgtgagtgtgggctgtggtgtgtccgtgtgtgtacatatgtgtatatgtatatatcacgcagcaggagtgtcattcatgctgctgtcccctggtgaagtgacaagtacaattaaaggtggctctgaaatggcctctggtttcttgggagtcgggcagggacctgcaggaggctttcccagcaggtgcacagaaggaagcgctgagcccactgtgtgcagagggtgtgtgcccagggcactgccacggcccccaccagcattggcctctgctctgcagggtggggtgcccatcctgggggctgtgtgtcatgctcacctgacccaggtgtgtgtcccggtgtgaaatcgaggaggggactggaagcccttccctgccttgaaacatgaaagctgattttctgagcagcagatacggtcagtggcaaagctgcatctgaagggcggcctgggaaggggccctgtgctggccccgggtccgccccagaggagtccacacagcaccacctccagaaggggctgggcccggggtcctgcaggcggcaccttttggtagagtttgtttccctggaaaatggggaaaatgtttcaagccaggtgaggggggaagttaacactgaaatatgtattgtttttaaaaatcaaatgcacacgcatggaagctgcttgtccatgcactggttttgtcactggcgtcctggaatccgaccgtgttggggtgcaggcgctgtcagactccggctgatcctggctcgagcacacacatctaagggccaggctggttccgcatggtgatctccgtcttgtatgtctgaatgttggcctaaaataaagattactgttgtaaaataaatgttttcactgcggaccccacgtatgtcttactcgctagtcccgcagatccctggttttggagagcagcagctgatctcagccctccacaccccttgcggctggaaccttgcttccctcctgcctggtccagatgtggataaatgccccctcctcttgattgtgttttcacctccgttttctaaataccaagactggagcaaagaggccaagcgtggtggctcatgcctataatcccagcactttgggaggccagtgtgggaggattgctttgagcccaggagttcaagaccaacctgggcaacagtgagatcgtgtctctacaaaaaagagtttaaaattatctgggtgtagccgtgcctgaggtcccagctcgtcaggagggaaatcacttgagcatgggaagtccacgctacagtgagctgtggtcacaccaccgaactccagcctgggtgacagagggagatcctgtcaacaaactaacaaaaactcagaataacgtaacaaacatcttgaaatcctctattctgacttaagaaaaacgaaggaagggccaggcatggtggctcacgcttgtaatccccagcactttgggaggccgaggtgggtggatcatgaggtcaggagatctgagaccatcctggccaacatggtgaaaccccgtctttactgaaaatacaaaaaaaattagctgagcgtggtggtgcgtgcctgtagtcccagctactcaagaggcttaggcaggagaatcgctagaacccgggaggtggaggttgcaacgcaccgagatcgtgccaccgctctccagcctgggtgggagagcgagactccgtctcaaaaaaaaaaaaaaatttgagtcagattttccattttaaaaaaatggcagcatccaagaccgttttgcgtctctccccatttccatcctctgcttccatagctttaaactctgtctaccactgtcaggtccagtaagacgtactattggtttatacctttttacataaattgtactacaccatagtactgagtacaccacctgccttatgagtttgtttgttttttttttttttgagatggagtctcgctctgtcacccaggctggagtgcagtggcgcgatcttggctcactgcaacctccgcctcctgggttcacgccatttaggaaaacgcatgcctcaccctcccgagtagctgggactacaggcgcccgccaccacgcctggctaattttttgtatttttagtggagatggggtttcaccgtgttagccaggatggtctcggatctcctgaccttgtgatctgcccacctcggcctcccaaagtgctgggattacaggcatgagccaccgcgcccggcctgtttttgtttttgagacggagtctttgtggcccaggctggagtgcagtggcacaatctcggctcactacaaccttcatctcctgggttgaagtgattcttgtgcctcagcctcctgagtagctgggattacaggcatgtgccaccacgcctggctaactttttgtatttagtagacggggtttcaccatgttggccagcctgatcttgaactccggacctcaggtaatccgcccgcctcggcctcccagggtgctgggattacaggcgtgagccactgcaccaggcctaagtttttcatttgatacagtagtagttaagaaatcaagccgtgtggttatattaggtctggttcattttagcttctgtacagaacagtcacgaattaatcacagtcggtcctgggcaaactgaccacaggtttttagtttctcactgtggaaacaaagctgcctgaatgtcgctgctgagttgtctcgggtgggatcgctgggagcgggatctggaagccttcccttgactggtggccccacactgccctgcaaagaggctccccatcttctcgctgccccttctagccttagcgttgtcagacgtttttttctggcttggtctttgaattttcttaattaagtagaatccacgtttattaagttcagttttttttttctttttcctttgagacagagtcttgctctgtcatccaggctggtgtgcaatggcgcgatctcggttcactgcagcttccgcctcctgcgttcaagcgattcttgtacctcagcctcccgagtagctgggactaaaggcgcgccaccacgcccagctaattttttgtatttttagtagagacgggggtttcaccatgttggccaggctggtctcgaacctatgtaggcctcccaaagtgctgggattacaggtgtgaggcagcgcgcccggcctatgttaagtattttatatatgggattcttacagagaaatgttaacagcaagccgagcactggacactgggtggcgggcagcaagacccttgccagggagggttgtcggccctgtttctcctggtccaggggaccgcggttaacaggcgctgcggcaaaactctccgtccgcccagcgccccaggaatctcctccgtctccaagacggggtcggaccaccctccccgctccccccggctatgccttccttgcgccccgctctccgtgaccgaggaacgccaggaagggaccacttctagcgccagccccgctgctcagggtcgggtggggggcggggccagcgcgggggcggggccggctcaggggcgtggtcactcggtggggcccagcgggacctggcctaccaggcggagcgggggctgggcaggggcgtggccaatcgggaccggtggggcgggcgagtggcgggagcgctgcacccgcagatgggccccccacgtggggaccagcgcccacccggcctggtcgcatgggcaatgggagaccccactgcagcgcaaggtctcgcggcatctgggaagaccggccttacgccgtccctcccttcgtcagcagacccctgtccaggatccgggatccggcataatcgaggtgccaggctccgaggacgccacgcttttggccgtggacttccacgcagaaagacactggcgcctgagaggacggggacgaccgtgtcccgtgtcagatgcgcctggcccacggctgagtccccagcatcagccctcagctccacggctgagccccgggaggctgattcagttatctgggcctctccggggcccgacgtgtgggcgccgcgcgtgcacctcctcttcctcagtaaaccacggcggcgactcctctcggggagcccggggggggcctgctcggaaagcagggtgggcaggacctaagggaacccacgcttgcgggcgtgggcacggcagagagcacgggatgcgggtgggcctccaggtctggaggggtgagcgaggcgggccctgagcagcagtggctccgggctcgtgggccccgggtggccccgcctccaagcgcaggcccccacttccgccctggtctgcctcctggctttgctgcctccagcgacttgtcctgacgggaaggaccctccccccccccaactgtggggaggaccctgatggtacaaatttgtgggtgggggcaaaacagcctgcctcttgtgagacccagagcaccagggggccctgtcccctccctaggtccaggccaggtggccaccaagctatgggttctaggggccccatctagcagagctaggagctgcagggcccagttctaccccttccttcatctggcacaagtgcaagactgggaatgcttggtcctgcaggggagaaggcagggccctcagctccctccctccctccccatgggagtctccacaaatgcatgcctcagccaggacacctctcctgtgctgtaaccaatcacaccttcatttttctaaagctttatttattttataaaatgcatagaataaattatactagtaacattttaaaaattaacatctttgtattcagcagtcctgggtcaggaggcaggaggagggtggtggggacgggatggctcactgggcagctaacccgtgtaggccacttcctcctcgtcactgccatcggggaccgcgtctgtcccaaagtagcggtcgccaaagttccctggaaaaaggggggggggggtccagtgtggtggggcctcccagggccacccaccctgccctcatgtgcggctgaagggcccgggcagcctcaccaatgcctgggatgatgcggaaaaggtcattgacccgcttgtccaccgccgtggtgatgattctcactcgcggaaatgcataggccactgagtgcacgcccatctctgccatgagcagcgacagcaaaaagatcttgtcctcaggcacgtcgtggtcctaccgagtgtattgggcaggtaaatcccacctctgcctgaacctgccccgcctacccagggctcactcaccaggagcacgcgcactgccatcatggccgccgcgcccgtggacacggtgcagtccatgaggatcacgtggtcatcgctgatgtccttgggcagcctcaggtagtggagctgcgggcagcaggggtcaggctgcaggtggggctccctgcgtccccttgctgtgagctccctctgccccctacccccgggctcatcaccccggctgcccccaggcacctcgggctccccggtaagctggttggtctggatgaggatggtgccgatgcgcacgtctttgcacacagcgcgcagcgcgggctccatggtttcaccggcgcgcagaatggacacaccggtgatctgcggggaggggaggctaagcgcccacatcccgccccagcagcctgtcccgcgcccaggtgtgcccaggcaggtacctgcttccccgcatagcacttgcccgcatagtcctgcccctgcggggtctgtacgacgcagtcctgtggggtgcagggtgaggactccggtgagcgcagggagctcgcaccggctccaagacccaccctccacctcgcgggctacgggctacgaacctgaaagggcaggaaggagagcgcgtgctcgatgagcagccgcatcagtctcttggagtagaagatgaactcgtcgcgactggtctccttgtccctgtggggccaacagttgagcgggagcacgcgcccggggccgccccgtccccaggtgggccctcacctgatgatggtgtgcatgccccgtacctgcggcgtgctcttcaggacgctcagcgtccggggcagcgggtggcactggtgtgccgaggccagcgcagccctggggacaaaccgatggggaacactcaagaagggggtcttttcccagagccctccctccccacaggacggctgtgcgtcactgtgaggggaacacacgggccaggcacagcacgaggtgcagagcgggcctgacttctgcctggggctgagctggggggagacgtcgccctacctgagctgtcaggcaaaggcgaaagatggcggcgaacaacggggcaagctcaccatcaggcagaaagctagcggggtaggctgtgagggcccctcccagtgcgggacccctcctgcgctaagaggaagcagaagtgggccgggcacagggcgggctcacacgtgctgataggtgtcataccccagaatgggtagcttgtccccagcctctccccgggggaactaaagctttgtggggtcaggccccgccctggctcctccccgaggtggtgcgcggcccctcaagagaggggggtggggggcaaagctggctcagtgtctcttggctgtcccgtcccgccccgctgcccaagcctggggatggccggggcagcagcaggtctaggagcgggcaggaaaagggcggggtggaggcaagaaagaggtgggacagggaggaggcaaagccggaaaggggcatgacaggggcagggaatggggcggggcaggaaagggggtgatgcaggggcaggaagaggaaagcgacaggccacagaattgggtgtggcaggggaaggaaagaggcagggcacggaattgggtgtggcagggcagaaaagaggcgtgacagcggcagggaaaggggcggggccgggaatggggtgtggcagggcagaaaagaggcgtgacagcggcagggaaaggggcggggccgggaatggggtgtggcagggcagaaaagaggcgtgacagcggcagggaaaggggcggggccgggaatggggtgtggcagggcagaaaagaggcgtgacagcggcagggaaaggggcggggccgggaatggggtgtggcagggcagaaaagaggcgtgacagcggcagggaaaggggcggggccgggaatggggtgtggcagggcagaaaagaggcgtgacagcggcagggaaaggggcggggccggaaatggggtgtggcagggcagaaaagaggcgtgacagcggcagggaaaggggcggggcaggagcaggaaagagggcctagcgggagcagcggggcaaggggctacgggaaggcgggtcacacagcagcaccacggagcacactgctcacatatcccaacgtagcttcctctgcttgccaggtgaagagcatgttcagggagggaacaaggcaggaaacgggggtttacagagagaaggaagagaacaaagagaaggctgcttagttggggagcagggcgttccccgcaggcctgaggaggagtgtgggcggtcaggcccccagccctgcctgaccctccctcctgcccccgaccaaggcttcctggggctgaaggaagtgagtgcagccacaggccaacacttccttggctgaccagacgacggaaaatgtgtctggctgcgttcaggtgtttttccaagtttgaaaccctggaaagtttttcctctcagaacaaaagcttcaggaggaacctgacgggacaagacctgcgggttcctaggccgaggagagggccaagcggagactcatgcaggcaccggaagctggacggctggtggacgggccctggaggcatttccaacatttggcaaactctttggagggctctgaatgtgagggctctccctccaggtggctcagtcaggagcctcccaacccacagaaggcagggagaagggcaggtcccttgtggctgacccccctgcatgcctgcccttggggagggacagtgggatgcggccccggcccagcccaagcttcttgctgcagttgcccagttcctgctggcagagctgtgcgggctgcgaggacagagctggggcaagcaggacccgggtgggtgggaggacaggcgcgaggccctccacctgcaaccagggaaagctgactggtccgtgaggctgggcacaggaggtacagcaggctccctggctgctgggacatgtctgtagtcactgccccagaggcctggcagtgctggctcaggaggacagctgtgctctctggggtcaaatcccatagacagactcaggagtcaggggagcctccagcaaagtctggccaggacagggtcaggactccgtgacgctgggcaagctacttcacgtctctgtgcctcagtgtcctcatctgccagcaaggggaggcagaagcagggctgggaccactccacaccaccccttctgtgactggggaagagccagctgcctggctggatcacagcccagaccccagagctccttggaggtgttggaagtgcctccatctgtgcagacagctgtgcaagtcttacctgacgctgagttcacgctgtggcagcaacacaggaagacacaagggaacggtggcgcgtcagtgaccagggcaggcggccaggccacccccacccaggaatggacatgctgcaggcccgcggggacacagccagccatggggggtggcaagcttctaatgcctgtaacctggggaccacctgggccagacctgcagttctgcgttggggcaatcagagccaggaccctgggctctgttctgcaggcctcaggccttcaacatcctggtagggagtgtgttcagagccactcaggctccaaggcccagccatagaatgcctcagggagcaggggacctctggtgggggtgtcgctcctggggtgaccccctgagaaagagaggagcctggcctggcgtgggactcagcagtgaaaccccacaatcctgggccagcaggtcatgcctgtcttcccaaaagctcaggctgggtgtgctgagcgggctgcaccctcggctgggtcctgagcacctgtacccccaccccagcttcctcagggaacccaggccctgcacagcacaacgggatggggtctgggctggacaatctgactggccaagcaggctcaggacactcagggctggcacctggcaggggacagtgaacgcagggggatgaggtgaccaggccactgggggtggtggcagcggagaagtgggtagaggggctgggggctaggccgtggggacgtgggaccccgctcacctcctccagctggctgtgcacgtgctgcacaatcaggtcgatggccaccgtgttgccgctccctggggcgggatgggggggcgggtgaccgggggctgggccgttggcctgcccgacacccacccaacaggcagcccagcaggctcacctctggggaccacgatgtctgccaggcgcatggtgggctggatgtactggtcgaaggagggcttgacaaacttgttgtactgcttgatgacaccctcgatgtcccggccgcgctcactgatgtcccggcgcagccgccgtaccaggcggatgtcggagtctgtgtccacaaagatcttcatgtccaggagctggtggagacagcgggccagtgagtggccagatgccagcagtgggcatggagacactgggaccagcccctgcactgaggccgcctggtccgtgggcctggccagagccacttccccagggcaccctggcaggtggggaggagtggggaggtgggggtgtctgcacctggtccgtgggcctggcccgagccacttccccagggcaccctggcaggtgggaaggagtggggaggtgggggtgtctggggatgcggtgctgcccgtcaggggcttaggtgaagaggcatggcatggtggctggctaaggaatcaggcaggaatggggctgggcacatgtgatctccttactttgcttggggtaacttgcaccaacacactggggaatgggggacgtggcgagtttagggtctgtccccatgctcagcacacagtagttggcccgtgaagaggccttgtggaggctgggggctgctatgtgccggatgatggagtcctctgggcctgtacaaggggcaggacctgggccctgggatcaggccaacctgagtcacactcagctgtgtcctgaaggcccccttgagctacagcaaaatctctcaaacacaccagccctgggtcctcacctgtccgtcaggaccacggcaagggacgagaacgccaaggacactccaggtatgcgcacaggcctcagccggtggagaggaaccactgcctcaggcagccacgctctgccttttggggccggcagatggacccagctgtggcatgcctggggttggggttggggtagggagtggctggcctaggcctatacagtgtggaggccttggggacagggcaggaggacgcacacctcatggacagggcggccagggctgagataccagcggggtgggtattcccggcgggtgcttacctccaacagtgtcttgtcagcaaaggccatgatgccctcaaagatgatgacgtttgcaccatacagtgttttctgtgaagaaacccaggagttgcggagcctggctcatgtgcctgcagccccccgaggccccctctgcagggccctggcctacccagtccttcttccggctgtgcgtggtgaagtcataaatgggcaccttgacactcttcccctgcttcagcttcttgagggtggaaatgatgaggtcgaagtcaaaggcatctgggtggtcgaagttgaagttgttgtgtgcggcctgttcctgctgctgctcagtcagcacctggtgggggaggctgtggagcagctgtgggcacagtagggccctcacccaatgccagcggacaggggctctaggcctcccaggagcagccacgctggggctgagaccagggacctacttttgcagggggtccagggtcagggagaggacaaaggggtcctcgggggagctgggcgggggcccaccttgtagaaggagtccatggacagcaagaccacccagggcacatccagggcctcgatgatcattctggccacagtggtcttcccagaggcactgccgcctcccaagcctgccggcgggagtggagaccctctgtgaggaacaggcaggctgccggcacagataggtcccagaggtgcccatcccgctgccgctgcctgcggttgcccggcttccttctcctgctccacaggcactggaggggagccggaggcaggcgtccggcagcaggtcccacccccccgctgctctcaccgatggcgaaggcctctttggattgcgtgccgtgttcattgtaccagggcggccgcccggcggtgtagatggtacgcttgcttgtacgcagcaggggaggctctgacttgcactggctggtggtccgcttccggggagagcgcccagtgcccacaggtggcaggagcctgtccagggactctgcattgctgctgcagagagggatgtactcggatgtggcccagagctgcccacctcccaggtacccgctggcatggccggcccacagggcaccccccccaccccctcaacaggcatggctgaggcgggcaggctcattgggggtacataagaactctgcctgggctgggcgtggtggctcatgcctgtaatcccagtactttgggaggccgaggcaggtggatcatttgaggtcaggagtttgagaccagcctggccaacatggtgaagacccgtctctactaaaaattaaaaaaaaaaaattacctgggtgcggtggtgggtgcctgtaatcccagctactagggaggctgaggcaggagaatggcttgaacccgggaggtggagattgcaatgagctatcgtgccactgcactccagtctgggtgacagagtgagactccacctcaaaaaaaaaaaaccctgcctcctgcctgcagctgggccacaggacacacagacccaagtgctcagcctggcacagggcctcagatcatcactgtccacacagcaaggacagaggaacagcaaacaaggacaagggaaggaggagaggcgctatcttggggccatgctcatcctgctgtgtggacaggcactggctgggccaggctctgtcccctaggggactcaaggtgggcctgtgaaaggcaggtgagaccccaaaatggaccacgttcccttgcaacccggcacactctctgggcagccaaatcgctgccatgctgaaggctgggtgcccaaggagacgtgagggcggcgtgtgggtggaggcgagaccagaccaggttgtgcgcacacaccgagggtgaggtccccagacaggaccaggctgaagggctcagggagagaggcagagggctcagccaggacctgattctcctgcagtgacagcaggcccagcacagtgcctcggcctggcctctctggctgtcagagtgccggatgggggaccctgcgctgggagccttattggaaccccattcattcttgctgtggcccctcctgggtccccaagacagaaacctccggcatctggcaaacaccagagaggaaagtgctgccacctgtctgggctgccgtgagcctgcccagggtaagggggagcccctaaagtctgcaagggggaaatcaacgggaggaagacacaggcctaggctgtgtggcatctacatgcactgcacgtgctggaccggcactcaggcgcctgccaacttctccgtcagtttacaacctcaagtgggcagggggccgtgactggccatggagccctgggaggggcagcctctggggaggctcaatatggccgagtgccctgctggggggttgggggggcatcaacgtggcgcctgcccagtctgttctgagaggctcagatgcagagcctggtgtgaagatgccatgagacaagacacaggtccggcagaaggcacttgtggccactgcccaggagacaccgagctggctgtggtggcctcagcaccatgtttcaggtctccctgggaagctctcaggggtcagcaccttggccctgcaggtcatggcccactcacatggggagcaactcagaaccacagtcactgtctgtgcagggcagagcccccgggggcaagagggaaagctccgcaaacggcaggaccgcctctttgtagcttcctgcagcggcacagtctgtccaccgcgctccggagttccacaggaaatggaacgctccacagatgccagttacgcccgaaaacgacacagaacacaggtgcggacagggaacggcatcctcagagcatggtcaggggagaaaagcaagctggaaggagagatgattccatctgtataaaatccaggaaacgaaggacgctcaccgccatgcgcctcggtgtgaggagggaggcgtgtgtgagagggaggggatgtgtgtgagagggagggggcgtgtgtgagagggaggggcgtgtgtgagagggaaggggcgtgtgtgagagggaggggcgtgtgtgagagggagggggtgtgtgtgagaccgagggggcgtgtaagggagggggtgtgtgtgagagggaagcgtgtgcacacaccagccctaaccatgatcactctctggccaccaagatttggaacagcaacttctgtcacatttgaatgtttttaaagcaggtgccactttgttgccataaaccaaaccgtagtctgtctttgaaggtggcatctccagcgtgggaacactgattcccacctgggcactcctccccgtgcacccgtgacacccacagccaggaggacagtgtccgtgtgcacacacagggggcagtggaaggagggagcccagcccgacacgtgacagctctcctgggcccagagaacagtgtggcagcatttaaagcagcaaagagacccgccgtctgcacctgacggggaaaacgcgctgtgcctctcctcagagacagacaggtctgcctgtttccatgccaccatcaggggagtgagcacggggaataatcagccaggcagcctcactcagcctcacctcggctccggagatcgttctggagctgagtggtgacgtcagcagcagggctgagcacaaacaacaaggccaggcgccaagacgaccaggcgagggcggcccgggggacagcaccactgcacggtgccctgaagggggagcaggtgccacggcacttccccgagaccgcatgcgggggctgcagctggaatgggacctgcaccccactcaggtctgcctgaagggctgtcagtcaagaaggaagacgggacccagcaaacagaagccacgacctcccagcggccctggacacacatgaccaacgcaccagcagtaaacaaaagggcctgcaagggtcacccccggggccacccctcccagcaggtggtgatggatggcccgcagctgtgcacagtggggcagtcctgcttaggttcagcagcaggttcccagcagacagaaacgctctggtggccctggaggccgtggtgggcagagaacaaatccaggcggcccctcccctctatgcctaaccccagcatctgcagggaatcacccactgtcttcaacctcagggaggaagccccgacacaatctgacttgcaaagaggctccccagcgaagctcccagcaccgcccttgcggctgcctgcacttccgccatgcaccctggattccgagggtgagcccgctaatgcacaaagctgggactaacttgagggacagacaccagacggcagaggccgggctggcaccgtgcctgctccccattggtagtctcctggtgctcagtcctctccagcaggagccttccaaccccgcatttgtgactcttcctcatcctactgaagtaacaaccccgtcaccgcagatccctcctgaggcacacgctgctgacagccaggcgctggcccttctgctgggagtggtgcccatgcagcggaacggtcacaagcaggccaggacgatctgccagaagcccgcctcaccgcaggcctgtgacggcgtcaggctgagtctgcaccgagcccagccccactaccttctccaaagctggtctgtctcagagccaaggacaaagcctcaccccacggttcacaagcagcaccccttgacaggaaagttggccgggtgtggtggctcatgccttgaacagtcctttggaggctgcagtgggaggactgcttgaggtcagcagttcgtgaccagcctgggcaacatggtgagacggtctccacacaaaaaactttagaatattaaaaataaataaaaacagaggagaaagttgcacagcaaacctcacttcctgtgcacagatggacaggagtgcttctggccacaacaacaaaaggttaattccaacccggagggttccaagccgtaaccaacacaagagagacgcgcccagaccaacagcctcaagcaaaatggcaccttcgaccctgggctctgcccggtgcccgagagcacctgccagcctgtttgattcctgatatccacagacatgcaccaaacacaggtctgagtggccaggaccacagcacaagtgggtgcccctcacggcagagacctccagtcgagactcacctgccttctgctccaagggcccggcaccctgagatcctgatgccagggtaagctggggggctgctcatggtcgaggacacgggtgggtgctcctgaacagcagagtggccccaggggtggatgcgtgggggctcaggcgcaggcagccgtgggggacatcaccacctcagacccacagcagtcccctagggcagctcaggagctccggccacctgaactggcccttccatgggcaggaccactcctgtgggcagcacagtgggtgcagagccgggtggctggggtgagacccttggctggcagaagctgcctgccaaatgtcagcagaggcacagcagctaggaggcccttgaagcctccaccgtactgagggaacagcactcactgccgtcctcagaggccaaggccacaggcataagaggatcacccagctgggggcttgtgtatgcctgatattaatagcgctggctttgcctggtgtggccctgacaatcctcgggccagccctcggtgtgaactgccccctcctgtgtgtgggctggcacattcggccagcctaggaccgcaggcctgcggaggaccactgtgcgccgtgtgcctgcacccctcctggatcccctggaaaaagctacagtaccccggcctgcctggggctacagagtgaaccccccgcagcaggacaaggatatctgaggcgcctcttggccaggtgtcctgaacgtcagtgctgagctgggcaccccatccctagccccagagtgcttccgacaggcataaacaaatctgaaactccaccctctggcaccatctgaaaataactgccttgccctacccccactcacgggggatcctgcagggacctgcagccacccagggctcaccacccagggctcagcagagcacaggggacacagccacctccccgcccagggctcagcagggcacaggggacacagccacctccccgcccagggctcagcagggcacaggggacacagccacctccccgcccagggctcagcagggcacaggggacacagccacctccccgcccacagaaacagggtttcggccccaccctccgcagagtcagtcaaggatgtgcacagagaagtcctggcagccctaagctctctcccaggggcagacaggtcagccatgggtgtcagcttcctcctaccatgggtttctcttggagcttctagtactgaggcaggggctgccagaagctcagggaaaagggaagactccacatggaggtcatactcctcaatagtaggccactcctgggagctgcctcagaggcaggaccggcccatctgtctgtgtccacaggtgcttcctctcctcattctgctcccaggaggcggctacatccctcacttgggaagtgggcaggagacagcccagggtcggggaggcggaggctgtcctgagcaggggcgcagagtccgggctcctgggggccatgccactggctgggctgtctgaacagcagagtggacgcagactggtcttgcctggcatgggcatgcaccctggctgccctagccggccaagaggcaaggctacaggcctggggaagccagcactgtgctggccaggcgagggacggaggagcccaggcacgcagctgtgaatggaaccaccaggccccaccctggaatcacgtcgcctcgctgcaggccacgtggtccccaacatgcccctccacggggctgctctcggccacagcagcccacggcagggaggggccgctcacggtggggaggggtagcctgccctggtcctattcactggtgttcctcccaggttctaacttcctgagctgggccggtccagagaactcccattcccacgccacccacaggtgctgatgccgcgctggggtaagcgctgcccagagcaccttctgcctaaggcttcctccttgcaggtggggctgtctgaggcccgtggtgctggaggctgcctcagtcacttcagggcaccccttgcccttccctcaccttcagccatcctactctgggccacagcacagtcgaatgtggctcagtcccctccacggagccacagcttgcctcagtttcctcctcaaggactaacagcaggttcattacaggtgggtcagctcataaagtccaaggcagatgcctcatcggtgatcaggccccataactgatgtcatcgtcaagaaataggcacaggtggccgggcgcggtggctcacgcctgtcatcccagcactgtgggaggccgaggcgggcggatcacccaaggtcggagtttgagaccagcctcaacgtggagaaaccttatctctactagaaatacaaaattagctgggcacggtggcacatgcctgtaatcccagcactttgggaggccaaggcaggtggatcacctgaggttgggcgtttgagaccagcctgaccaacatggagaaaccctgtctctactaaaaacacaaaattagccgggcgtagtggcacatgcctgtaatcccagctacttgggaggctgaggcaggagaattgcttgaacccgggaggcagaggttgctgtgagctgagattgcgccactgcaatccagcctgggcaacaagagcaaaactccatctcaaaaacaaaacaaaacaaaacaaaagaaatacacacaggcagccgggtgcagtggctcacgcctgtaatcccagcactttcagaggctgagcgggcagatcatctgaggtcaggagttcaagaccagcctggccaacatggtgaaaccccgtctctactaaaaatacaaaaaattagctgggcgtggtggcgggcgcctgtagtcccagctactcgggaggctgaggcaggagaactgcttgaacccgggaggcggaggttgcagtgagccgagatggtgccattgcactccagcccaggactctatctccaaaaaaaaaagaaaggaagaaaaataagcacaggcatgtgtggagacctggaggcagggctgcccctcacgaaccatccacaatgccaaggaaaccagaagcaaacgtccagcagcagggagcgcagggcatgtgaaaccgacactgaggaaacagccacgggagagagcacacagggagaaaggaaggctcgggcactcccttgctgtggttcaggcctgttctaccacccctggggtcaccatcgcccacggaccttcctgctgggtgcctgtagcacggcacctcctgacaggtcaggtttaagggaagtttgctggataactaaaatgaggctggggggaggagggagcagggaggagctagcccacaggagccaatgcaggcctgaccccactggtgccggactgactcagggagagtcattagggctgctttctcaggctggatgagcactgggggttgggggcttgccctggcccaccccaccactcaggaaaccttccctcagcaggacctgccctgcacagatcatgggcagcctccctctgctccccacttccacagccccagactccatctcaaccgcagccaggagtcactgctaacaccacaaaggacctgttcctgcaccagcacgggccagctctgggggcaggtgcccaggacagagtcacgagtggcaagcagacaataaacaacaggcaagatggacagactgattgccgggaggatgtggcaggaggcactggaacggtggtggaggaaccccagccctggggacagacctccacccgtgcacagacctccaagctggagcctgctctggaacactaagggcagcagcagaggttgaagaggggcagacgcaggaacgttggggacacgctcggggaacagtgagaaaagccctaggctggggcagaggaagtcctcgatggcacaagcatcaggacacaaagtgcaagaaatgtgcctaagacaagaggcagttccagggcagaccggggcccctggagaagggtgctgcaatctatcctcactgcctggagcttccctcctgtcccttggtaaccacaccaaagaaagataacaacagtctctgcctcgtgggacacagcgagggccaccgtgcccagcccaccgtctgtgcacagggcaggcccagatggctgctgccaccaacctgtgtcatccaggagtgcctttctcaagagctctcagtgcttatctagcgttggcctgccccacctcgggttaaatcaaaacctctttggtggctgggcgcggtggctcacgcctgtaatcccacggaggccgaggcgggcagatcacctgaggtcaggagttggagaccagcctggacaacctgacaaaatacctctctactaaaaatacaaaaaaaaattagccgggcgtggtggcgcacacctgtaattccagctactcgggaggctgaggcaggagaattgcttgaactgagctcgggaaagggaggttgcagtgagccgagatcgagccactgcactccagcctgggcgacagagtgagactccatctcaaaacaaaaaaacaacgcctctttggaaccagcagaggaacagactcaggccctattagactccagccatgcaaagttcctagtcactgcccactgggagggtgtggacctgaagggacgcagggccaggggaaagctctttctgctcagcagctcctggagaggagcgaccctgtgccgggacacccttccccctgcggcatccagcgcagcccatctctgagggagtcctggctcacagcgtttctgacaggagtcacagcctgaacccaggcaagaggcgcctgagtgggaacaaccccttcctggggaccccgcgggctccccaagggacacttcagacccggaagggaggggcagcgcccagagcgccctcttgcagccccgggcactgcgtggccaccgccccctgacggccacggccccaaaggcgccgcgcagggcccggctcccagaggggccactcggggtgacgaaccggggtgggggcgggttcctcccgctgcacccccacaacttccccacttcatgctcttgcaaagcccccgcagaggctcgaaggtgccacgcgcgtgcgaggcaatccgaaggcaccgtgcgccgcagcacctccaaatcctaagccctggcctcgcgggtcgggcagggccacaccccgagccgacaacatagaccaactcgcacagtcgagcaggcacacagcccgccgggcgctcgaggccgagggccccacccaccgggggcagagaccaaggtcaacgctgggggtgcgcacccggactccttccccgagccccgaggagcctgccggcttgggccaggtccgtcctcccggccgcttcaagcccgcggggttccacccggcacgtgggagaacggggcgccgccgcctggcctccgggagtgggggacttgggctcgcggcggggacggaccacccgcccagctcggccggatctgcagccccttcccgctcgccagtggagtggaggcgaggcccacgcctaccggtcctcgcacgcggtctcgcttttctcagcctgccggcctggtgtgtctcgggccgtaggtggcgacgtgggcgaaggatcagcgtccgcgcgggccgggggcgcagccatggcgctcggaggcctctttgcgggcctggccgggcggcgcgcatgggccgccgggagctggcgggtccctctcttgcccaccgcggactacaagccccacaaggccgcgcgtcgcggactacaagccccacaaggccgcgcgtcgcggactacaagccccacaaggccgcgcgtcgcggactacaagccccacaaggccgcgcgtcgcggactacaagccccacaaggccgcgcggcgggcatgggggacccgtagttcggcagcctccgccacgtgcctggagggccccgccccctgtttttcaccacaaactgagccgcacaaaaaccctggaaaaaaatcaataaacatttatttgatacagtcattttaatacatacagtgatggcccgtccccacgccactcgggaccagggcgcggggcggggacgaggaccggggacagatggtcacaaggcgggcggggcccgaactcaccgttgaaacatctcgcaaataaacactttgtagatagaatatatatgtatatatatatggttacaagtgatagctggaacctctttcaaaatgcacttatgtactgagaactggcattaaaaaacccaaaccaagaaacccaaagcacgggacgcccggccgcgaggcaggggaaagcctggggccccagacccgggcctgggggagccgcctggggccccgccaaacgcggcacacggggacggcccctcccggggtcaggctcactggctccttcccttcagcgccaccaggcaggagggccaacggtcacacaggaggcaccctcacctgcctttgcaccagcaaataaagtgcatcccattttcgtgtgagcgtcggcccggtgagtcagcccttccgggccctttcctgttctcagggcagggggcgtgcgctgagccagaggtagatctgcagaaagggccccgactgggcctcgggcagggccggcgcccaccacactctgggggtcagctatgctggtccctctcactgagggctcctggaggcctatgtgggccagcgtagggagtgggcagaccctgctgagctccacccagggccccaccccttgggaggagggctctgcggaccagcatgtggcagagggagggcagaaaggagggggtcagacccaacagccacttctggcagtagcccccacgcctaccttaaagacaaagggggttaaagtgctaaacatcaaggtatccaggactcctcttcccacaccagggattatctgtgggctttgggagtgtcccggaaactcacccccagcaaaaaccagaccctcttctcttctccccaagggccaagtacctgagaggctggggcaggcaccacaccctgcaggtgttcaggtccaccctcctcccgccattggtggcaaggacaaagtgcacctaggcccccgcccagtgcctgctcccctcccctcccctcccctcccctcatgaggctgccccagcagcagctgccagaccccaccctccacctccggctcctccagctccaccagtgaagctctgggacacaggaaggaatgcctcccccgaccctctgacgctgggtcacgcccatctctgccccagcctccatcctctcatcaggccgaggtgtgcgtgggtggggggagtccgggtctccacacccactccctggcacatctggcaagggctgctgagggttggagccttctggcccaaggatgaagccagagacaggaagtgttctgcaaccccagtccccaaagtgctcctggaacttgtctccctactactgcaggccaagcccagtggggccccttctccctggggaatgggggagggtgggtgctgggggcagaggcagtgcccagtcagtactgcctccctgagcagcaagggaccccaaccccagagacccacgccctggtccagcccagcccccaggcccaccgtctgcaccaggaaacccttagcaccaaatgtcggattgcgagtgtttgtataaaaaacaatttaaaaaaaaggttgttacttgtcacagcaacaagactggcatccactacacccaggagacacacgcacacgggcaaacatcaaaattctcatcgtccagggtcagtggggccgagccctcagcccactcccacccaccctggaaaatggcctccctccaaacctaccccctctgagcctcatcctccctgcaatgccgtggttggaaggcaggaccccagggagggagccacaggctgtggccacctcttccaggcaccctggactccctgcctgacccctgccctacctatagacccagccgtcctcagggccacaaaggggcaaagacagctctggagctgccatcaacctgctgtgactttggccaagcccctcccctggctggccttcagttcccatatcaaatgaccacacaaccagaaacaatgggggcaggttaaaaaaaaaagtggggagggggctcccatgagagcttggccactgggcctacccagattggcagacagaaggctgcctttcccccagtggccactcagagccaggccagctctgcccagcttcctgccccacatgcctatgggccccagcaagaccccagggcccgaactagtccgtccctactccacgaggctgctccaacctaggcctgcagtgccagaaggctgaacactggaggagagcacactccaggggccccacacccccagggctggcagctgtgttgaagggcatcaagcttctgctgccctgtaggtacaagaagcaaaacccctcccttgccccaagctgggagaattacagacaggcctggggggcagggcctgagcacagcagggatcgcactgacaaaggaggagcaggggtgggggtagtgggcaggcctggagaggtagaaaacagaagcaaggggaccaagtgggtggccaagggcaggccggagcctgtcaggtcagcatggcagtggtcagacaggggtctgtcctgggaggtagctgggggtgctggagttccagtgttgggtggaggtgaggccaggatggtggctgcccgtgccaggttgctcaggtgccctcaccagcccagaaccacaggtcaccagggatgcctgagccttggggtagccagggaagggacccggcagggcctgaggaagcggagccggggggccaaaggccatctgcctactctgcgctgcagcccctgtggcaccaagaccccagacacattcccatgaggaggggcaaccctcctggctattgcacttctgctgggcacaccttggggagccccaacccaggtgtgccctgtggcagccttaacaggggaagggccaccttcagggaagggagagtggctggctgccccactggacggatgaagaggcgggggtgggggatggagaactggaggacagaggtcccggagctggccctgccttgaacagagggcggtgtggcggctgcatgggggccaggccccacgcaccatgctcacttttcaggcgccttgctgactcccaccttccggccggtggagccccgggcccccttgtctctgcatcctggaggccagtcgtcccggcgcgggggcagcttggccacaggctcctctggggtccgctccttgggctttcggccccgcttctttccacctgccagatttttcttcttttccttcttgggcaccaatgagtcctggctcctgtgtttgggaggtgggtctgctgatgttcggaaccagttctggggagagaaaagcgctgatgaagacctgggactggatgctgagcacctgagccaggcatagcctgagagctgaagacctgtcagccttcaggaccaggcaagcacctgcagcagggctggacacagcctttaggaccaggcaggcacctgcagcagggggctgaacacagccttcgggaccaggcaagcacctgcagggggctggacacagccttcgggaccaggcaagcacctgcagcagggctggacacagccttcgggaccaggcaagcacctgcagcagggctggacacagccttctggaccaggcaagcacctgcagcagggggctggacacagccttcaggaccaggcaggcacctgccgcagggctggacacagccttcaggaccaggcaggcacctgccgcagggctggacacagccttcaggaccaggcaggcacctgccgcagggctggacacagccttcaggaccaggcaggcacctgccgcagggctggacacagccttcgggaccaggcaggcacctgcagcagggggctggacacagccttcgggaccaggcaagcacctgcagggggctggacacagccttcgggaccaggcaagcacctgcagcagggctggacacagccttcaggaccaggcaagcacctgcagcagggctggacacagccttcaggaccaggcaagcacctgcagggagctggacacagccttcaggaccaggcaagcacctgcagcagggggctggacacagccttcaggaccaggcaagcacctgcagcagggggctggacacagccttcgggaccaggcaagcacctgcagggggctggacacagccttcgggaccaggcaagcacctgcagcagggctggacacagccttcgggaccaggcaagcacctgcagcagggctgctgggggctggaaaggcggacaccccgagggcagctccagctcagggtgcaagcctcccagttctcccagggaagccagaccccactttgaggagaaactaccagatttctccacattggccactctcccaggcacaccccatgcaggccactgacctctctacccccaaggggtgcccaaccccagccctgtcccctcctgggctagcccccagccacaggccctggtgatggccctcgcacctctgcgtgggtcttcaggatgtggtatttgacgccactctcagaactgaactccttcggacacagcagacagcggtacttccctgccaggtgggccccctgcaatgcataggcaggccagtgccccagcccttggaggacccagatctgtcctaagcccctactcatggctaaagggtcagagtcagcggtggcccaaggaaagctgtggctgtctgtgccagacaatgcagggggccactgagttaccagggcggcaggggtggtaggggagaggaagggtagggagaggcaggtgcccaggggaagagttgcagacctttgccgagcatcccttattgtaagccagtgtgccatctgcgtgggtcggggtgcccacccatgcctacatggacgcagagctccaaggacaggactaggactcgttgtcttgtggctggggttggggcgagggaggtgtcctaggctggccatcagccaccggccagtctctgggttcgtggaagaggaggccacgtagaaaaagtaggggacaaggcagggtccctcactactgtgtgggaagcccgcgtggggtgagctgggagctctgagtgcagcgcacctggccgtggggcaggccccagaactgaccttactgcagctggcgagatgagccttgagtccggacacgctggagtagatggcttcacagcactgcagggaagggagccgtgggcgaaggcctctggtgggcaccccacaccaagatatacccctgccctaccccaggggatctctgaggctctttggggcaagtgagggggtgtgagtcctggggactgggcaggctgggcatgtgaggcctggggtgggcttgggcacctcctgaaagctctcagcctctgttcctgctcagagggccacacccaggctctggccctgtatggctccccacgccccccacccggctgcctccgctcacgtcgttgggacagttgacgtggcctttctccttcacttcattcttccatgcctctagcagctgggggttcagcgtggggagccctggtcgagtgtagttgagctgtgaattcgacagcaccagggtgagcctgaggccagaagacaccccagctgctctaagaacactcgcctcggcagcaggcgacactcgccgcagatggcgggggcagcgggtggcccaggtcacagcagtggctgtcccaagtctcaggccaaggcatgccccacgcagaggccacggcgctgtccacagccctggggggggcagctcacccgtgcggtctcgggcacaaggtcatccttcatgcgccgcttggtccagtcgcgggccagctcgtcctccgctatctcctgcaggtggaacaccgccacctgggccgacgtgcggcggacacgcccgcttggggtccgctccacacccagcgggtcctcagcctcaggggacttgtctgtgggctcctcagggggctggagggcaggaaggcatggaggctagagtgagccgcgggagcaagagtcaggtcagcgcgcggcgaggccaccctaaggccggtggacccacaggcctcccagtgtgctggggacatggctgacgcaggcaacccgagggaacacggaggtttcaccctcccgcccaccaggacacacgtctcttacagagaggggtgggaaacacacgcgttgggcggtacatggacaaatacagttggcacccaaggcacacggaacacacacggcacacaggaacaagcactgtgccacagaacagagagccactcacgggggccgtgtgctccgagcgcacgtggtagtcgtggccagccttggatcggtacgtcttgccacagtgggtgcaggggaaggaggggctgtccacctcgcagggcggcttcccgcagcgccgctggtggtactggtagcccatgaggctggagaaggcagccccgcaaccctgggggtcaggccagagggtgggtgagtggccagcagggcccccccaccccacactgccgcggccccccactgacctcctgggggcagcgcagccgtcccatctgcttcagcaccttgcgcagcctctcgcgctcctcctgctcgcccccttcggaggcctcggcgtcagagggctggggacagggtgagcatcggtgacccggcaccatcgccacggagccctgccctggccccgccccgcccaggtgttgggccaccgttgtccgaggttagaaaccgggggcactgcggtgaaggtggggtgcgaggtcagaggtcacgctggacgggagctgggggcccgacggtaccttggcactgtgctcggccatagtgtggtagttgaggccggctttggacttgaactgcttccggcagtgctggcacttgagtgcatcctgaagctgcagatggcccacatgtgagaagcctgcctggggccagggcgcctccctcccagcgccttccgggagctgccttaccttctgacacacctccatgtgcttcttaagccccacgagagtcttccgggtgaccacgttgcaggtggggcagacggcttccccgcgctcatggatggccctctgccactgctcttcagggccacctgtgggtaaggcaggggcctcgaaggcttgtgggggctgctgggtggcccagacgccaggcacagaatccagtctccacactcagcccccatccctgtgctgtgggatctacccgccgtctagagctgccctgagcccctgccaggcagcccctacctggagctgggtgggccacaggggccggtgcctccttgctgacagtgatgggggcagctggcaccttcttccgggcgtcctcagggcctggcccctcctgcttcttggagcggtgaactcgggccttgtcctcagctttgaccaggcctgtgtgcacacatggggtggagagaaacagggatgggctcaggggctgtcactcggtggacagccccagccctggaggtgcacaccgggctggggtcttacctttgagcccaaaggtccctgagatggatggctgctcccctgtaaactttttgggtgttttctgtttccttcctgactcggggagagaaaacgggggccaagattctggtgaaataaccgtcaggaggccgagcctgccccggccgccacccctggagctctcatcttactgtgctttgtgcgctccgggtcctcctcaggcggggacgcagggcctgcagccttcagtgcctccatgccccctgacggcctgctgcctggcgacaaggagccactgctggtgtctgcactcagctggaaggccgagctctggcccatggaggaggggccgtactccccattctctggcctggcctgcttgggtggaattgggcaggtgtccaggctgtccgcagccctgcagggagcaggtgaggtgagggccaggagggcctaactgtgggccccattacccccaggccgtggccgaggagcaccctgacctggaacgagcccccataccttttctcaccactgttccccgacctgggacaagcccccataccttttcttaccactgttccctgacctgggacgagcccccataccttttctcaccactgttccctgacctgggacgagcccccataccttttctcaccactgttccccgacctgggacgagcccccataccttttctcaccactgttccctgacctgggacgagcccccataccttttctcaccactgttcctccccgacctgggacgagcccccataccttttctcaccactgttccccgacctgggacgagcccccataccttttctcaccactgttccctgacctggaacgagcccccataccttttctcaccactgttccccgacctgggacgagcccccataccttttctcaccactgttccccgacctgggacgagcccccataccttttctcaccactgttccccgacctgggacgagcccccataccttttctcaccactgttccccgacctgggacgagcccccataccttttctcaccactgttccccgacctgggacgagcccccataccttttctcaccactgttccctgacctgggacgagcccccataccttttctcaccactgttccccgacctgggacgagcccccataccttttcttaccactgttccccgacctgggacgagcccccataccttttcttaccactgttcctccccgacctgggacgagcccccataccttttctcaccactgttcctccccaacctgggacgagcccccataccttttctcaccactgttcctccccgacctgggacgagcccccataccttttctcaccactgttccctgacctgggacgagcccccataccttttcttaccactgttcctccccgacctgggacgagcccccataccttttcttaccactgttcctccccgacctgggacgagcccccataccttttcttaccactgttcctccccgacctgggacgagcccccataccttttcttaccactgttccccgacctgggacgagcccccataccttttctcaccactgttccctgacctgggacgagcccccataccttttcttaccactgttccctgacctgggacgagcccccataccttttctcaccactgttcctccccgacctgggacgagcccccataccttttctcaccactgttccccgacctgggacgagcccccataccttttcttaccactgttcctccctgacctgggacgagcccccataccttttcttaccactgttcctccccgacctgggacgagcccccataccttttcttaccactgttcctccctgtggcacgaggtgctttgttctccgacctggtcagcagcaccattttgcagggcggtgtgtgtctgctgatagcaatgggcctgctgactgtcaccggcttgctgaccacaatgggcctgctgactgtcactggcttggtgaccggcacgggtttcgtaactgtcacaagctttgttaccgtaatgggtttggtgacaggtacgggtttggtgaccggcacagacttggtgactgtgatgggtttggtgaccggcatggccttggtgacgggcatgggcctgctgactgtgacaggtttggtgactggcacgggcctagtgaccgggatggccttggtgactggcatgggtctgccgaccgagactggcttgctgatgccaatgggtttgctgacacccacaggtttgccaatagtgacaggtttgctcactccgatgggcttgctgaccccaacaggccggctgatggtgaccggcctgctgatgggcccaggcttggaggcaggcaggggtcggtccatgtggttccagatccggtgtttctccagctgggtcttagaggtgaatgcggcctcgcagaaggggcaggggaaggccaggcgatctgagatggcaccctgggcagggaagggaaggtttgggacagggccccaagggcctctgcccaaacacaccccgaggcctcctctcccccgacccacagtcccttaccccttggcaccgctggtaatggtacttgagcccgtagatgctggggaactccagccagcaccctgagtttggacacttcaccctcgagtgtgccttgaactcatccttccagtcgttcatcagggagagctaggcgtggggaaaggtggtgctgctgacccgcagccacctgggccactgccagcccgagccccagactcagagcccccccgggcctgcagggcacacacaccacatgagcccctcaacctcgggactgcagtgggaattcaagccacctggcaggggccatgcacaagacccgttctaggagcccaccaacgcgatcccccgaatctcccggcacatcagatacaaagccaggccacgtgaagtctgccaggccagtgcccacatcttgaggcatagagttggtaccagatgtgcagaggacaaatcagggcagggcagtggctggatagggagaccccagcatgagccccaccatggccctgagggagctcacaggaatgtctcggagggcctggttctcggcttttggccgcccctttttcttcccttctgtcttgtcactggctggacttcccgggtcaaagcagagaggggcctggccgggcactgtctgtccaccacggaccaccggcatccctgcagcacacaacacagcaaggctcggaagctgtgtagcaccgcctaccaccggcggctgcacaggcccacagtgagcaccgctgtcccaacacgagggcaccgggggcaggggctgcggccagctgaggacaagaacccaggaccctgggctatgtccaaggcaacccctaccctggtaaggtccttgggaactctaggggcctagctgggtacctggagacaggacgcccagggcaatggtccactcctaccacttgctgcccagaaccatctggaattgactctggccctgactcctcttacccatcttcggtgggtcatgcagcattggaagtcggacctcctttcggctgccatccttcccgggaccactcttgctggaccccgggagccgacggcctccaacgcagaaaggatccgtcatctctgcagagcaagtagacaatctgtgaagcctgacgggccccacttggaacacgtggtgaggctgccctggagccctgcccttggcaggtcctctctggtcagggaagaggggcctgccttcctgtggttttgttcacgtgggaaaagcaagtgatgggggcttctgacttaggggaggggctgccagccaaggtctccccagataacccaggagtcatcatcagtttgataggatctagtcctgtcctgagaccctcaccaacttccagacccccttcccaacacgcagctctacagtgtacgcagctccacagtgtgcgtagccccacagctgcgaagatgatgccgaaggtgatgcactcctacccagtgctgggagggggtgtgcccctgggagaggtgccttgcgcaggaggaaggaggctggcaacattcctccaggggccaattatgtctctgatgatggctgctggctcacaagctgcccaggcccagcagtgggggcacagcttctcactggggccctcataccttcccatgctgacttgatgcaatgccagcctacccaggcaggtacccttggaatcttctctccagacacagatggaaaacagccaaggtgggcactgaggacccctggcccaatctggcactgcaccaagctcccgtccctgtgccggctgaactatcctacctgatgctcttcgcagacttgtctccaggcttggcaggctgacccgccccccacctctctctggatcctctcagtcctctgcctacagacccaccactaccacttcagccaaacaagtcgtggaagcaccagcagtgaaggcccaggatgctggccagagagaacgccctgctgcccaaggctggggcccccgagggcctgtgctgctgggaaccccatcctgagagctggggagcagaggagactctgggcccagccctgtggaaaagccacggaagggggtgggacaggaagcagggtgagggttgagtgggcaggtggccccctcctgatagcttctaattaacttggatccgaggggatgggaaggggctgctgtgtccaggagggccagagagctgaggtcagaggtcaggacagtcactgcccattgccaagggggaggccagtgtccggggacaaagttctctggaagtcctcactttgcaacttttgaaaggagacagggccggcatgagtcatcccagcacctgatgaccccggtggcctggggtgcaggtgcctgctgaggccccacttccaatttttctgaagcctgggagaagaattcagaatagtggggcctgaggccagggccagcctgggaggcagagacgcgactggcgccccggatgagaaggggcttcggccctcccgagcccagcggggacacagagccctcgcggggagagggggctccgccgcgctgcgcgcaggagacgccagcagcgggtccgccgcgtaggccgttcggcccgggaccccggcccaggcctggcgcgcgggtgagcgcggccagggacgcgcacctggggccagcctcgccacccacctgtcacctggggccgggagcgggcgcggggcgcgggcctcggcctggccgggcagggccgatcgcgggcgcggggtgggggggcgaaggcagtgaaccaaaatggcgactttttctggagaaggaggaggcaggaagacggcgccggcgcggggcgcgggggctcgggcgcggcggggggcgggggggctccgggcccggccccctccttggcctgcgcgcagggtcgagatccggggcgcggtgggcgccggggctgcggccagaatgggtccggggcgcggccgggcgcttacctgcggcgcccagcggggctgcggccgggccgggccgggccggggcggggggcgcggggcgcggggcgctgggtccgggcggcgcaggctgcgcgccgcgctgcgcacatgcgcgctcccgcccctcccacctttgacagttttactgcgggggggagggggcgaactctcgcgttattcccgcggccgctccgcgacggggagggggcggggagggggcgggggcgggggcgggggcccggcgctggcctgtggttcccccgctccgcggttccgcccccgtcggccgggcccgcagtccagagtagccggttctgccgtcctggggcgggggacgttttttggacagtggggtaaactgaggcccgataggggcgctaggcactgcccggagtccggcgcgcacggattgaggcgacctgattccgccgcatcctggcccgcgcggcgagtgtggtctctgggctcgggaccctgacctctggccctgggggccgtgcaccggcagcgcaggattcagccttcttccaactggccctgagaccacttttgcgactgacccccggaggtgcctggcggcttaaggccatggggttttactggggtcactgaccattgggtcaccctttcccagctctgggggcagtggttctgaaccagtgccagggccttctctgccccacagcttgggcttctgcaggcagggggcactggggtccggtgtgggctgagtggtctggaggtggcggggcactgacagcacaggacttgggaatgaatgagacagagaaaggttggctctcctaaagaggactggtaggaggcaccacacgggactggcacaggacccacaagaatctcccccaggagagcctgcctgcctgcctgcctgccttccttccttccctctcttacttccttctctccttccttccttccttcttccttccctcccttctcttccttcccttccctccctccctcccttcttccttcctttccttccttcttccttccttccttttctctttccttccttctcttctcttccctccctcccttcctcccttccttctcttccttcccttaccttcctccctcccttcttccttcctttccttccttcttccttccttcccttcccttcctcccttccttttctccttccttcccttccttctcttccctccctccctttctccttccttccttcctttctctctctttctttttctcccctcccctcccttctcctcccctcccttcccctcctctcctttctccttctccgttctttttttattcttgagatagggtctcgctctgtcattcaggctggaatgcagtggtgtgatcttggctcactgcagcctctaccacctgggctcaagcaatcctcccacctcggcctcccaagtagctggaactacaggtgtgtgccaccccacctggctaagttttaaagtattcatagagacgaggtctttctgtgttgactaggctggtcttgaactcctgggcttaagccatcttcctgcctcagcctcccacagtgtgggcattacaggtgtgacccaccgcctctggctaggagggcatttttttttttttttttttttgagacagagtctggctctgtagcccaggctggagtgcagtggtgcgatctcggctcactgcaagctccgcctcctgggttcatgccattctcctgcctcagccaaccaagtagctggaactacaggcgcccaccaccacgcccggctaatttttttgtatttttagtagagacggagtttcaccctgttagccaggatggtctcaatctcctgacctcgtgatccgcccacctcggcctcccaaagtgctgggattacaggcgtgagccactgcccctggccttaggagggccattcttacctgttcacagcacccatctcccagggaaggcctcaggcctcaggagggaagagtcaaggagactctgggttttcatcttgtgcccatagagcatttttttttttttttttttgagatggagtctctctctgttgcccaggctggactgcagtggcgccatctctgctcactgcaacctccgcctcctgggttcaagcaattctgcctcagccccctgagtagctgggattacaggcacgtgccaccatacccagctgattttttgtatttttagtagagacggggttttaccaagctggccaggctggtctcgaactcctgacctcgtgatccacccacctcggcctcccaaagtgctggaattacaggcatgcgccaccgcacccagccagcattttttttaaaaccatgtgcatatattacttttataattaaaacagacttttaaaagtttcgtaatgcccctttttgcatactacaaatattctggactccttaaaattgatgtgggctggaagttgctagtcaggaaatggaactaccaggtgtgcctccttcgctggggcccttccggcccagtcggcccctttccctgtaccccgtggagcaagctcagaggcactgctagggggttgggcagtaagatttttgcctttcctcaaaggggcctgggatctgcttcactcaaggctggtgcagagcactcacatggagattggaggttggctcttatagaagaggcagtcagtcaatccttccttcgggaatctgagtcagagaggccagtgcacaccagcctgtgtgacccgaggaggaaggggagggcattccctgtgaggctagcgtcatcacgtccttcccttgttgacctttcccaccctggggacgggaccagcaggatttcctgaggggtcagtgtgtgtccccttaggtgcagccaaggccgtcagctctccctgtgtaagtctgggtgtccatacatgcgacctgtttggacattgccgtgtcaggatatgacagtgtcccatgctaggtgagaccaatgcctgtctgtattttagcatctgggcgactagacctcagggtacctggggacgatgtgtctggatttcagtatccatgtgtccaggctgcggcatgtctcagtgtcagggtgctggtgagggacggctgttttctgtgagcatctacatgccagggtgtcgtggaatacagtgtgtttgtgtgcaccggggatgtgccgtgtcccatgtgtttctatgtgttaggaggtcgttgtgtgtctgcatgctagtatttgtgtatttgtgtaatgacatctttgtatgggggcatgctgttacatacctttgtgtctgtgtgcctggccaactacatgcatgtgtttgtgtgtgttggtgtttgctggtgtcagtgtcattgagtctctgtgtgtggtttatgctcttatgtgtctgattgctgtgtgtgtgtggtgtgtgtgtgtgtgtgtgtgtgtgctgtgatctgtgtttgagacagggtcttgctctgttgcccaggctggagtgcagttgtgtggttagagctcactgtgccttgaactcctgggctcaaggaatcttcctgcctcagcctcccaagtagctgggactacgggtatgcgccaccatgcctggctagtttcaaaagttttttgtagagatggggtcttgctatgtcacacaggctggtcttgaactcctggccttcagcgacactcctgccttggtctcccacagtgctgggattgcaggcgtgagccaccgtaccaggccagatgtttgtgttttatccctgaacgtgtgaatgggatcttattgggaaaagggtatttgcagatgtgatgaaagatcttgtgatgaggagattatcctgtattacccaggtggccccaaatccaagcatccttataagagagagacagagggagatttgagagacagaagaggaggaggtgatctgattacagaggcggagacgggtaatgcccatgcgcccgagttcccccggcagccactggaagctggagaggtgaggagtcgccccaggaggccctgagggagctggattttggactgcggcctccagaactccagagagaatgaatgtctgctgttctcagcacccctccgtggtcctctgtcacggcagccgcgggaccctcacgcgctgtctgggccgtcccttccagcgtgtcgggcgttgtgtccagcactggggaccgcccacaggcgtgacttgagccctgtttccagcctctgcgcggggttgcccagacgcccctccagggcgtgacgccactgccccctggtggccgcggctgcccagacgccctctcctcgcagacccagcaccgccagcacttgggaaccagctttatttctgattttttttttttgtcagagtataaaaaagtgagtgcagcaaaacaaggaagacgagacaggcgtgcgtgggccagggcaagacagaggagaagggagggaagcagaggcagaagggccccttgggcgaaggctgatggtgggaggcgggcagaatacttgcgcagccacacaggggcagggatgagggtctccccgtggtgggggcttacaggatgggagcggccaggccagttgtccaaattccacctgggacctgcagtgaccagcctcgagtctggaggctcaaagcacacagaggggactaggggctcagcctcatctgtccctgagattttcagaagccacagggggactgggagagggcagaggcgcaagagggtggaggcggctagggccgccctcactgtccttccgccaggcagcaccagccccaaaccacccagagaggggttgctcaggcctctgggagggtgtaaggggagtggccctgggaaggcctctcccctgaatccaggccttcttgggaaagcagcaatgggaaggcccacgcacaaggcccttgttcttgagggcgaggggggaagaccataaaagcaagattttcccaaagatagggcagggagcactgctaagcctgggccctgggcgcggagccacctggacagggctggggttctcgttgtgccacattttgtctctggcgcttggtcaatctggtcctttctcagctttacttctcatgaatagagggggtgtggtgacgatgtataaataatgatgaaagtgcttggcatggtgcccgttaggcgggtgctgatggccactactctagatgatgggttggcctgctgggccctggcaggtgcatgggcacaagccacagggagccgaggcagcttatggtacctgtgtgggccaacctggaggtgctggggaacgacctagaactgggctgggtgggtggacagacaagtgactcagcaggcgatgggggaccgacatcacgtggagaggggaatgtaaataaacagactccctgggagtctaggggggacatccaaaccggttctggctccaggcagctgccccacatgctgccagctgcaccaggggagggcttgggctcaggtcccaggaggtggggccacactcaagcagccccctacccacccagccccagggcacgacctggaatgtccaaccagaggcgcctggaggtgtgatcctggtcctgtctgtccgttgggccagcctggccgccccggcatcccgcagggtccaagaggcgctgcggggccagcttggcctcctccctagccgtggactcccatcacagtgctggggtctgggttcaagcctcagcagcagctaggacattttcccgaaggaagctgtgtgatggaagagggtgagaatggggtggggtctttggcatcatctgcattagggcgcttactggggcctgcagccgacctcctgaggtcatcccaccccacactcagaggggcttctccatcagcccccaggcctctctggcacctcacactgaccttggctgagcagctgcaggctccgcccctcctcacgcacctgcaggcggagcacctgctgcagcacctcctgcctctgggcctcctgggccagccccatccgctgcagcttctccgcattcagccgcagcagtgcccggcctggggagaggaaagaggggctgagctgaggccaacagaggcatcaagagccaaggcaaggctggtgccatggctcatgcctgtgatcccagcactttgggaggccgaggcgggcagatcacttgaggtcaggagttcaagaccagcctggacaacatggtgaaaccccgtttctactaaaagtataaaaattagctgggcttggtggtgtgcgcctgtagtcccagctactcgggaggctgaggcgggaggatcacttgaacctgggaggtggaggttgcagtgagctgagatcgtgccactgcactccagactggatgacagagcgagactccttctcagaaacaaacaaacaaacaaacaacaaactgagccaaggcagaagcagggactgaaagagaaaaagggaggagagagagaggaagcgggaagcacgggcacagagagactcggagagagggaggagagagagaggaagcgaggttcagagagactcagagggagaaagagaatcagcaaaacacacagagacttaaaggagagaggcagagggaaaggaaggagagcaaaaggcagggacggaacagagaaaagccagatgaagacagcacagagagatgggaagagacacagaagaaaggcagagaggtccggacgcagtggctcacacctgtaatcccagcactttgggaggctgaggcaggcggatcacctgagatcaggagttcgagatcatcctgggcaacacagtgaaaccctgtctctactaaaaatacaaaattagccaggcgtggtggtgcatgcctgtaatcccaggtactcgggaggctgaggcaggaggattgcttgaacctggcaggcagaggatgtggtgagccaagatcgcaccatttcactcagcctgggcaacaggagtaaatctctgtctcaccaaaaaaaaaaaaaaaaaaaaaaaaaaagaaaggcagagagatagaaaagacagattctgcggagatgaagaacagaggggaggttgattcacaggagaaactagacagacgaaaacaacagcaagagaaaggcaggctgagtgtggggaagagacgctctgaggcaggttagccccactcccacagcaccctcagcgccactgtaccggtgatggcatgctgggagaaggcctccacgtagacgaggtagttgtggggacagtgcttcttgagccacttgcagacgtcctgctgactccacaggaccacgggccgggtcaggccacccagcgaggggcttgtatggtacaggccatagtggtcagagtacagccggccctgcaggggaggggcgtggcaggcagagtgagagtggtggagaaggagggcagggacggaggtgggtggagtgggtgggtacctggggggtgtctgtgccgggctgctgcaggagcttgattggcctgctgctggccgccctctggctgcgggagtcatgccacgtgaggctggtgccaggtgtccgaggcaagtggcaggggatgctctcagctgacaccgtgtgctccaggagggtccggcagaagctgaagtgggcagtggctgtgtgtgggggtgcctggtcagggcagtcaagggcagaaccagaggcttcctctacttgagagctagctccctgccccatctcctccacactagtgcgggaaatcacctccccaatgaggggttcccaagcctccaaaggcagaaggaagtgtgcaggacctgtttcgaggacctcacccagcacaaaaagagaagaactggaaacacctttcatcttgcaagtctacagccctcacccaggggagcaggatggattcttagatcagaggatgtgccctctagggaagggaacctgagacatatgacaagaggagctatcctgggacagccctgacctcacccttgccttgggctggcccacaagtcttgcacacaccacaccagaccaggaagtgcacacacggcctgctttgaggaaaggcagatcccgagtccggggaggtcgtctgtgctggggaaaccgggctgaggatgctgcttgcccatcgccactgaaggcacccagttcacacagccctatctggtgttggggcccgactcactgactatgactcattgacagcctgaactgtgggccaactgacaagcagggctcactccgcaaacacgcgctgggctctccagctgtgccgccccccacagggcctgcagcccgggacaacaccggccatgtgaatggtgggtacccattggatatgggcgggtcagcacaggtatgtggggtgcagccattgcttggggacccacggtgatgctctgtgctccctcttcccacagtaactgcattaaagtgtttcatctgagctttgtcatcatctctgggggcactgctgacctgagtctggggaggcaggcgtcttgatccaggtctggttacagaggggcaccccacattcattgtcaatgaatgaatgaatgaaggctctgtatggtatctgcaagtgaacagagcctgtggggagacagaaggtgggcacaggcctgcccctgtctttacagcaccctagcacccaggccttcagcagggcaggtgaggttcccacgctagggccctcatcccatccaccctagagtgagagaccctcccggcctcagactcagccacccactccacacccagggcaggggttggggatgtgtctaggaggtctaagtatcggtgaaaaccacatcctacttccccgtcctcccacgcctgtaagacttaggagacataacaccttccgcccccattcttgcaactttcaggaaccggacccctgggtgactccaaatttgaggtctggggtcagcagagggtgtgctcagtgggccaccgccccgaggtggcccctagtgctgtgggaaaaggcttattctaagcccgcgccttccagcggacaggcgccgtggtcgccgggctttgcagggcctcgagcggcggggctggtgcagaagcgcgcggcagtccggggaaacccgtcggactcctcagcccgcacggcacctgccccggccaagcaggctccgcccatttcctgcctgcactcccggagggagttccgtccgtcccgcggtctgtcggtccggtccctcccgccccaacgtcaggattccagaaggaaatggggcgggggcaccgaggcgggatgtgacctcggccccctttcggccccactgcaaaagcgggggagggttttccccgtgcgcaggaaaaggtgacccgagcgtagtgccagcctggacacaggcgccccggcttgacaccccctcaccccaagccaagggcgcgctgacccccaaggcctgaggctggctgccccctaaagcaggacaaaggctacgggaccccgttgagccgagacatccgccgaatacccccagccaccgccgctcgaagcccgccgggtcccgccccgcccccgtgcctctgggtccctgagacccccgcccgagaaatccccgctccccaatccagccccgctcaccgtccacatcccggcgctccccgaagcccgcgcgcacggccccggcgcggccacgcggggggctcagcttggacctcagctcggtgaacatggggcccgcgggtgccaggcccgcgcacacgcccctcgccgagtgcagggcggccggtgtggccggcggggaacgcgcgccgccgccccgccccgccccagccggccccgcgcccgagccggtccccgcggcccgcgagtgtgcgcgacgaggcacctgccgccgagccctgtgtgccgggcgcgctccgggagctccgaggtgtgtcggcggcgcgcgggcctgcgtgcaccaaggctgtccgccagggcgaggggcgtccgtgcgcccctgggcacggctccgcggaggagagtccccgtgaacctgccgggcgtcctctgaggtcgggcccctctgtgcgtgggggtgggctgaggggcatctcacaggggtcttctacctaccggggccaggacaaggggcaggtcaacgcctcccacacactttcctcggtctcctacgtctttactcgccttcaaataggcacccgcttccccggagaaaccagcttgactcttgcttaccgcccaccccactgtgaacatcagggtggttctcccttccctctgcagccccagaacctggctcagtgcccgggggagagggggcggtacagtgctctgtaactgaaaggggcttggcttgcctggagatggggcagaggggaactccaaggaggctgtagcaggccggagcggtgtgtttgctccaggactccagtgagaagtgctgagatggggctgggctagggaactgtggttgcctggtgcagcagcaggccaggcttgcaaccagctattcggcttgctctgcccaggagcctgggtgctctccctgggtgtatgtaggggctctggaggatgtcttacagcaggaggaccagagatgcacacagacatgtagaaatgcatgcacagagtacagtcatgcacttgcacccaaaacacgagcacacgtgacctctgtgcacacaccccactaatcacacacacagaattcacccacatgcttgacagccatgttcatgtactgacgtgttcccgacagctcagctgcggttatttatttcgtcaattagctctccaggagctaaggatgtggccctcaccagaatgtccaaggcatgttggcgggcgtgggtggggtctctagtcccactggagggacagatgcctgaatgggggttcaagaatatgagtgctaaaagcgtagggcagcagtgtgcgcacaggacgcacacagacaggtgtgcccataaccagtacacacaagctctacacaactggacagggtacagctctgctcggacagggcgcaccaggggcgagggcgggcagctgggctggttcagagggagggggccatgggttcagagggaggggaccatgggtcccactctcacagacaggtctccggactgcatcagagcactcgggaagcagcaatgccccaggctgtttttagcccccaggggccagttagggtcccagtgcaagctcgacctagcttcttccgcctctccacgaggaggcgctcccgcgcacgcgcctaccacgttcctgccccctagccgcggccggaagtcgtcgaaccaggacgtcgggacttccgcccagggaatcaaaagtgggcggggcgtgtgcggactgagcgctctgcttccggggcgcgggtgacgcgacgacggcgacactttgctacggagtgcatcggacgtcgaagcctagagtctctgcgtctttccctcttccgctgcctcattcctttccttcctagccttggtcgtcgccgccaccatgaacaagaagaagaaaccgttcctagggatgcccgcgcccctcggctacgtgccggggctgggccgggggtgaggcctggggcggcgcgcgaggggcggggacccggctacaggagcgcagtgctttggggcgtgtttgggggcgggggtctatggccgcgcagtctgaaagacgcttggtggatcggcttaatccctgcaggaagcaacgggctttggggtcaggacatacctgtgtgtgcaccctgcttgccgcctagatgtgacacattgactctcagcccagtgttttggtctgtaagatgggtaatgctgtatacggtctgcagtgaggagtagaggaatctgacgtgtagtggaaacacgcgaccaccttcctcaggtcgggctgacactccccccccccgcccgcccgcccgccccgccttaagcgtgcctgggtcctctatgcctgcaacacagatgaccaccgtgcgttgctggataagtgagcagtcgttattatcctatttggctattcatttgatgaggaacactactgggtttttcttggtggtggtattatattggaatctgtggggcacacacaagctcactaaggagggtttgctattaccataaataagtacgtaaagaggaccagatttagaacccagtgcttaatggagagtagcattggagccaagtttagtaagagagctggacttagggctgtagaaacggtgacgatagaagagaaactgacattctgcgtgtgggagttcaaaaaaagtgaggcaaggaggaagcccagggaacaggagggagtccagtgtgagtggaatgtacagcgaatagaatagagctcaggaggttggaggggccttgagcgtcaggctagagctcctggagacgttagaaagatcatgacccttcagaattattattattattattattttttgagacaaagtcttgttctgtcgcccaagctggagtgcaatggtgcgatctcagctccctgcaatctctgccccccgggttcaagcagttctctgcctcagcctcctgagtagctgggattataggtgcccgctaccacgcccggctaatttttgtatttttagtagagacagggtttcaccatgttggccaggggggtcttgaactcctgacctcatgatccacccgcctccgtctcccaaagtgctgggattacaggcgtgagccaccacgcccggcccagaattttttactcagagctgtgttttgggaagaatcatctggcagagcatgggttgaagtagaggaaggctaaaggcagggagaggtaacttggtttccagctgtgatgggagtcatagtctgggaaggagggattttgaaagtggattcattagtacttggggacagacaggatggggaaagtgggagagggaggcaaaaattacatcatggtcccgtggcatctgggacagctgttatcagctgaaaccccccagagcagctgtaaggtgggcacggaagagctcagtgtgggccaagttgggtttaagggcctggttggatgtggagggggagatgatcgaagccttagggtggagagagattgccttggtaacatcatcagggtaggctgaaactttcaggtaagcagagaagatcagaagtgtttgagactgcagttcattgtcaccaggatctttggaggtttcccaaaggtgttagaaaaagaggtgttagtaagtgataaccaggagtggagaagagcacaggaacagagttattcagacacccggtgtcttgggggtctcctgcagcgccactggcttcaccacgcggtcagacattgggcccgcccgtgatgcaaatgaccctgtggatgatcgccatgcacccccaggcaagagaaccgttggggaccagatgaagaaaaatcaggctgctgacgatgacgacgaggatctaaatgacaccaattacgatgaggtgagatgtgtccggctttcgtggctcctccagccagtctctgggagcagctgacctaaccagtgtgtgttggtgtctgtaatgaatggcttggagtggctcatgcatttaaattttagctattcatggaacatctttactgagagtgagagggagcaggaaaaacacggagaaatgtgcactttttgtccctcagaagagatgttcttgcaggtgttaggaccactgccttggcattttctattgcccagtcttttttttttttgagacggaatttcgctcttgtcggaagagatgttcttgcaggtgttaggaccactgccttggcatttcctattggccagtcttttttttttgagatggaatttcgctcttgtcggaagagatgttcttgcaggtgttaggaccactgccttggcatttcctattggccagtctttttttttttttttttttgagacggactttcgctcttgttggccaggctggagtgcagtggtgtgatctcagctcactgtgacctctgcctccccatttcaagcgattctcctgcctcagtctccaagtaactgggattacaggcatgcgccaccatgcctggctaattttgtatttttagtagagacagggtttctccatgttggtcaggctggtctcgaactcctgacttcaggttgtccgcacgcttcggcttcccaaagtgttgggattacaggcgtgagccactgcgcctggctgccagtctttaatgataaaaacttaaagtggaattggtgatagtatttgctttttttagctttagtgattgccctctaaacagacatctaaagaaaaacttcagctgactgaataccgattaactgtcttctaacagatgacatttttcctctgaggaaaatttttaaaaataattttagttttgaggccaggtgcggtagctcacacctataatcctggcacttttggaggccgaggtgggcggatcatgaggccaggatatcgagaccatcctgtttaacatggtgaaaccccgtctctactaaaactacacaaaaattagccgggcatggtggcatgtgcctgtagtcccagctactcgggaggctgaggcagaagaatgctgtgaacccgggaggcggaggttgcggtgagccaagattgcgccactgcactccagccttggcgagagtgcgagactctgtctcagaaaaaaaaaaaaaattagttttgaaataattttaaatttgcaggaatttgcaaaaatagtgcccccccaaaaaaaagtttctgcatgtctttcaccaagcttctcccgatgttacatgaccttagtgcagttattgaaacgaaggagttaacattgacacagtactattaactaatttgtcagtcgtatttgcatttcatgtttttccatgaatgtccgctttctggcttaggcttagtccaggatcccccattgcatttcgtcatgtctccttggtcccttccaattgggggtctcctctgtcttccatgcccttgacgcttgaagagtagtcaccagttatatggtagactgtcccttgatttggcttcgttggctgaagaaaataatttagcaagtatttcacaagtagagatctccgtttcgctggtggggatggtgttgaaggaaaagctgacctctacacgtgttgtttgcttctcagtttaatggctatgctgggagcctcttctcaagtggaccctacgagaaagatgatgaggaagcagatgctatctatgcagccctggataaaaggatggatgaaagaagaaaagaaagacggtaaaagaaattgttgcctttcacaatatttatccaagtttaaaaaaaagttttgtggccaggcgcagtggctcacgtgtgtaatcctagcactttgagaggctgaggtaggacgatagctagagcccaggggtttgagaccagtgtgggcaacgtagggagacttaatctctacaaataatttaaaaattagccagatggtacacacctgtagtcccagctacttgggtggctgaggtggaaggaccgtttaagcccaggaggtagaaactgcagtgagccatgatcattccagcctggttggcatagtgagaccctgtctcaaaaaaaaaaaaaagttttgttttgaattgttttatatttggagaaaagttgcaatagagtatgtgtgtctgcttagcttttaggccacctgagggtcttggtctgtcgtagccatgcctggataagcactgggctgttacagaacagccttagggcctgggggctgcagtggagagcttaagaactcttaagtttttccagaaatcagcagaattttgtggattacttttacgatacatcagggttaccatctttgaaatgaaaagggcctactgacttgattattatatgttgagtaatttgcaaatgaattaaagatgttaaatgacacatacaagctaccaagattgaaccatgaagaaatcccaaacctgaacagaccaataaaaggtaatgagatcaaagctgtaacagaaagtgtcctagcagagaacatctcaggatctgattgcttcattgctgaattttaccaaatatttgaagaagaactaataccaattctactcagactattctgaaaaatagaggagggaatacttccaaacttattctacagaaccagtattaccctgataccaaaaccagacaaagacacactgaaaaaagaaaatgttaggtcagtatccctgatgaacactgatgcagaaatcagcagaatactagcaaaccatattcaacaacacattagaaagatggttcatcggctgggcgcagtggatcacgcctgtaattctagcactttgggaggccgaggtgggcggatgatgggtcatctgaggtcaggagttcaagaccagtctggccaacctagtgaaacccagtctctactaaaaatacaaaaattagccgggcatggtgggtggtgtacgcctataatcccagctacttgggaggctgaggcaagagaatcgcttgaactcgggaggtggaggttgcagtgagccgaggtcacaacactgcactctagcctgggagacaagagcaagactccatctcaaaaaaaaaaaaaaaaaaagatcgttcatcatgaccaagtggcattttgcccaggggatacaagtgcaagggtggttcaacatatgcaaattaatcagtgttatacatcatatcaacagaatgaaggacaaaaaccatatgatctttttttttttttttttgagacggagtctcgctctgttgcccaggctggagtgcagtggcgcaatctcagctcactgcaacctccacctcctgggttcaagtgattctcctgcctcagcctcctgagtagctgggactacagttgcccgccaccacgcctggctaattttttgtatttttagtagagacgggatttcactgtgttagccaggatggtcttgatctcctgacctcatgatccacctgcctcggcctcccaaagtgctgggattacaggcgtgagccactgcgcccggcctaatcattttaattgattctgaaaatgcatttgataagattcaacattccttgatgataaaaactctcaaaaaactgcatatagaagaaacatacctcaggctgggtgtggtggctcacgtctgtaatcccagcactttgggaggctgaggcgggaggactgcttgatctcaggagtttgagaccagcctaggcaagagggtaataccttttctttacaaaaaaatacaaaaattagccaggcttcgtggcacacacctgtagtcctagctactcaggaggctgagatgggagaattacttgagcccaggaggcagaggttgcagtgagctgagatcataccaccacacttcagcctgggccacagagcgagaccctgtctcaaaaaaaaaaaaaaaaaaaagggggggggagcataacacaataaaagctatatacagctggatggggtggttcacgcctgtaatcacagccctttgggaggcccaggcaggcagatcatttgaggtcaggagtttgagaccatcctgaccaacatggtaaaaccctgtctctactaaaaatccaaagattagttgggtgtggtggctcaggcctataatttcagctactcaggaggtggaggttacagtgagctgagattgtgccactgcactccagcctgggcaacacaatgagactgtgtcgcaaagaaaaaaaaaagccacatatggtaggcccacagctcgtatcatactgaatggggaaaaactggaacgcaacaaggatgcccactttcaccactgtgattcaacattgtactggaagtcctagctagagcagtcggaccagagaaataaataaaagggcatccagattggaaaagaagaagttaaattatccttgtttgcagatgatatgatcttatatttagaaaaccctaaagactctaccaaaacactattggaactgacaaattgattaaagttgcaggctatgcccccaggtgtggtggctcacacctgtaatcccagcactttgggaggctgagggtgggtggatcacctgaggtcaggagtttgagaccagcctggccaacaaagagaaaccctgtcactattaagaatacaaaaatggccgggcacggtggctcacgcctgtaatcccagcactttgggaggccgaggcaggtggatgactggaggtcaggagttcgagaccagcctgaccaacgtggtgaaaccctgtctctactaaaaaaattacaaaagttgccaggcgctgggactcacgcctgtaatcccagcaccttgggagagtgaggtgggtggatcacttgaggtcaggagtttgagaccaggctgaccaacatagtgaaaccctgtctctactaaaaatacaaaaattagctgggtgtagtggcacacgtctgtaatcccagctactcaggaggctgaggcaagagaattgcttgaacctaggaggcaaatgttgtagtgagctgagattgcaccactgcactccagcctgagtgacggggcaagactctgtctcaaaaaaaaaaaaaaccaaaaaacaaaaattagccgggtgtgggggtgcacgcctgtagtcccagctagttgggaggctgaggcaggagaatcgcttgaacccaggaggtcgaggttgcagtgagctgagattgcaccactgcactccagcctgggtaacagagtgagactccatcttaaaataaaagaaaatatccatactacccaaagtaatttacagattcaatgcaatccgtatcaaaatactggggacattattaacagatagtgaaaaaatagccaggtgcagtggctcatgcctgtaatcccaacactttgggaggctgaggcaggtggatcacttgaggtcagcagttcgagaccagcctggctaaaccccatctctactaaaaatacaaaaattagttgggcatggtgacaggtgcctgtaatcccagctacttgggaggctgaggcaggagaatcacttgaacctggaaggcagaggttgcagtcagctgagatcgtgccattgcactccggcctgggcaacagagtgagactccgtctcaaaaaaaaaaaaagaaaaagaaaaaataattctaaaatgtacatggagccaaaaaagacccagaataggcaaagctatcctgagcaaaaggaacaaaactgggggaacacttgacttcaaattatactacagagctgtagtaacaaaaacagcatagtactggcagaaaaacagacacatagaccaatggaacagaatggacccagaaacaaataggtacctctacagtgaactcattcttgacaaatgtaccaggaatatttattggggaaaagacaatctcttcaataaacggtgctgggaaaactggatatctatatacagaagaatgaaactagacccctctctgtcaccacatacaaaaatcaaattaaaagactttaagacctcaagctgaaactactagaagaaaacattggagaaactctacaggacattggactaggcaaagatttcttgagtaataccccacaagcacaggcaacgaacggaagccaggtgtggtggctcgctcccgtgagccaagagtgcgctactgcactccagcctgggccacagagactgtctcaaaaaggaaaaaaataaaaagttctcattatagaatattaggaaaataagagtaagtatgggtaaaagcataacatttattcataagtctagaaagtaacagttaacattttggctcatttcctctttctgttgcttttttttatcttggctcactgcaacctctgcctcccgggttcaagcaattctcctgcctcagcctcccaagtagctgggattacaggtgcctgccaccacgcctggctagtttttgtattttagtagagacggggtttcaccatgttggccaggatggtctcaaactcctggccttgtgctccatccacctcggcctcccaaagtgctgggattacagacgtgagccactgcgcccagctctgttgctttttatacatgtaatcataacttcctgtgatgtatgtagaatgttttattttttgaagataattttagaatagtaaaatatagttcttctggaattttatttattttttatttttttgagtctcccaggctcaagtgattcttctgcctcagcctcccaagtagccgggattataggcacgcgccaccacacctggctaatttttgtgtttttagtagagacagggttttaccatgttggccaggccggtcttgaactcctgaccccaagtgatccacccgcctcagcctcccaaagtgttggaattacaggtatgagccaccgtgcccagtcttgccacacactttaaacaaccagatcttacgtgatgtaaacttgctgcctcgaggacagcaccaggccatcaggggtctgccctcaagactcaagtggcctcccaccaggccccacctcaaacattgggaattataattcagcatgagatttcatggggacacagatgtaaaccatatcctttggcctcccagagtgctgggattacagacataagtcaatgtgcctggcctggacatctttttagaagctcgttattaaatcattgtgcataaattttatacctatagtaattaaacgtgaatggcattgcatttcacttttttttttttttggatacaggatcttactctgtcacccagggtggagcgcggtggcttgattatagctccctgtaaccttcaattcctggctcaagcgattctcctgcttcagcctcccaggtagctgggattacaagcacgtgctaccacacccagctaatttttcttttttctttttttttttttgagatggagtctcactctattgcccaggctggagtgcaatggcgcaacctcggcttactgcaacctccgcctccagggttcaagtgattctcctgcctcagcctcccaagtggctgggattacaggcatgcaccgccacgcccggctgatttttgtagagatgggtatttttagtagagacggggtttcaccaatgttagccaggctggtcttgaactcctgcccttgtgatctgcctgccttggcctcccaaggtgctgggattacaggcttgagccaccacgccaggctcacacccagctaatttttgtctatgttgcccaggctggtcttgaactcctggcctcaagtgatccacctgcctcccctaaccttggcctcccaaagtgctaggattacaggcatgagttactacactcagccctacattttaaaaattgattggaacctccagggttaatgcattttaaaaaacatcaggctgggtgcagtggcttacatgtgtaatcctagtaccttgggaggccaaggcaggaggaccacttgagtctaggagttcgagaccagcctgggcaacatggtgaaaccctgtctctacaaaaacaaaattaaaattagccagttgcacatgcccgtagttccagctacattcccaaggctgaggcaggagcatcgcttgagcctaggaattagaggctacagtgagctatgcttatgccactgtgctccagcctgggcaacagaccaaggccgtgtctctaaaacaaaaacaaaacaaaaaacagcaggtgacacggacccatgaagaaagccattaaattaaatgtttttaaaaagtagtgtacttggccgagcacggtggctcacacctataatcccagcactttgggaggccgaggcgggcagatcatgaggtcaggagatcgagaccatcctggccaacatggtgaaaccccgtctctactaacaatacaaaaattagctgggtgtggtggtgcatgcctgtaatcccagctactcaggaggctgaggcacgagaatcacttaaacccaggaggcggaggttgcagtgagctgagatcgcaccactgcattccagcctggtgacagagtgagactgtctcaaagaaaaaaaaaaaagtagtgtacttattaaaactttttattctgaaaactgtcgtaatacaaacaagtaggaagaacagtactgtgaataccatatcctcacatgtagtctcaacaccgaagtgcaattacatgggttatgttctggcacatagagctgtgcagctgagctgagttggttagaggtgaactatttacttggaagagaaggaagcaaggaaggaaaggtgggatgagttcagtagagtgtttggagtgtttggtggtaactaggatagttactgtttttccttgtaggtgtttttttgttttgttttgttttgttttgttttgcgacaaggtctcgctctgtcgcccaggctagattggctcactgcaacctccacttcctggattcagatgattctcctgcctcagtctcccaggtagctggggattacaggtgcccaccaccatgcccagctaatttttatttttatttttatttttttgagacgaagtttcactcttgtcacccaggctggagtgcaatggcatgatcttggctccctgcaacttccacctcccaggttcaagcaattctcctacctcagcctcctgagtagctgggataacaggcatgcgccaccacgcctggctaattttcatatttttagtatagatggggttttaccacattggccaggcttgaactcctgacctcaggtgatctgcccacctcggcctcccaaagcgttgggattacaggtgtaagccaccacgcctggccttcttaggtgtttatgggatggtcctacctttgggattttgtgaattttcaagcagtaaatatacacatgtccaaatggaggtatttagatcaaagtaagatcttttttttttattttaatgaatttctacatgtttttatttggtggataattgaattagtagacttacgaatgtatttatatttatttatttagaggcagagtctctctgtgttgcccaggctggagtgcagtggtgcgatcttggctcactgcaccctctgcctcctgggttcaaatgattctgcctcagcctcccaagtagctgtgattacaggtgtgtgctaccatgcccagctaagaatgtattcatagttaccttaaaatatatttgatttgggctgggtgcggtggctcacacctgtaatcccagcactttgggaggccaaggtgggtagatcacaaggtcaggagttcgagaacagcctggccaggatggtgaaaccccgtctctactaaaaacacaaaaattagctgggagtggtggcgagcacctgtaatcccagctacttgggaggctgaggcaggaaaatcacttaaacccaggaggtggaggttgcagtgagctgagattgcgccactgcactttagcctgggtgacagagcaagactccatctcaaaaaaaaaaatgtgtgtgtgtgtgtgtgtgtgtgtgtgtgtgtgtgtatatgtatatatatatatatatatttgatttagctactaagagtatggaattgttctttttggtgatttaattgagatggataataaatttgcttcagaacagacatgcagtgtttctgatgtgtgcatgttttatttcctagggagcaaagggagaaagaagaaatagagaaatatcgtatggaacgccccaaaatccaacagcagttctcagacctcaaggtgagccgatgaagcggtgaatggtgtgcggtttctaacgctctcaccctaacccgcagagactcagactgctcttacgtggaatttatgagactttacgtttttaatttagggggtcattgcttagaagaagaaagtgtttgcttcagtatgtttaattatatgtgtgtaaaaaaaaacccttcccctactgtaaaaggtaggacaaatgaacttattttctttgtaattttgactccatttatacctaagattttcttttttcttttttctttttttttttggaggcagtctggctctgttgccctggctggagtgcagtggcgtggtctcagctcactgcaaccttcacctcctaggttcaagcaattcttgtgcctcagcctcctaagtagctgggattacaggtgcctgccaccatacccagctaatttttgtatttttagtaaagacaggatttcgccatgtgtaccaggctggtctcaaactcctgaactctagtgatctgcccacctcagcctcccaaagggctgggattacaggcgtgagccaccacgtctggccccatttatacgtaagattttctaaactgtgtcccctgggctttgagagaataatttacattttagtgaagttgaacagatccaataaattgatttttcttttctttttcttttttttttttttttgagacggagtttggctcttgttgcccaggctggagtgcaatgacgcgatctcagctcaccgcaacctccgcctcccaggttcaaacgattctcctgcctcagcctccctagtagctgggattacaggcatgtgccaccatgcccggctaattttgtatttttagtagagatggggtttctccatgttggtcaggctggtctcgaactcccgacctcaggtgatctgcccgctttggcctcccaaagtgctgggattaacaggcatgagccaccgtgcccggcctaaattgatttttctaagtgaagtagaaaactatttttggggctgggtacagtggctcacatctgtaatctcagcactttgggaggctgaggtgggaggatcacttgagcccaggagtttgagaccagccttggggagaacctgtctttacaaaaaataaaaacttagccaggcatggtggcccacgcttgtggtcccagcaacttgagaagctgaagtgggaggatcacttgagcctgggaggttgaggctgcagtgagctgtgattgtgccactgaatccagcctgggcaacagaatgagacccatctcaaaacaaaagtaaaaaacagttgctgcatccaaatcccttctaaagcttggtgatctggaggctaggggtgagagagggcatggtcctacctgggcacatgaaattctgtcagagaattaatgtttttgggggctggatatttccagaggaagttggcagaagtcacagaagaagagtggctgagcatccccgaggttggcgatgccagaaataaacgtcagcggaacccacgctatgagaagctgacccctgttcctgacagtttctttgccaaacatttacagaccggagagaaccatacctcagtggatccccgacaaactgtgagcttccaaaaaagggcacatgtggcccatttagtcctgttagatcagtggcaggaatggtgggtggtgttggattcaatgcttctgcaggtcatggctatgctgtggccgagtctgtctgcacagctgtgcatatgtcaggccactggggaagtatttcagagagtaaatttcttgggcatgcagtgcaaaccgttgttttattcttgcctttcctctcttcccctccagcaatttggaggtcttaacacaccctatccaggtggactaaacactccatacccaggtggaatgacgccaggactgatgacacctggcacaggtgagctggacatgaggaagattggccaagcgaggaacactctgatggacatgaggctgagccaggtgagtttgtcacacagcattttcctgtggacaggtttagacagtttaattttgttttgttttctttttctccttcttcttcttctcctttttcttctcctccttctcctcctcctccttcttctccttctcctttttttttttttggcttgatttttgcctgaataattccgcagatttttaaaattttgacccagagtcttgctgtgtcactcagaggctggagtgcaatggtgtgatcttggctcactgcaacctccacctcctgggttcaagtgattctcctacctcagcctcctgagtagctgggattacaggtgcccaccaccacacccggctaatttttgtattttttgtagagacggggttttaccatgttggccaggctggtcttgaactcctgacctcaggtgatctgtctgccttggcctcccaaaatgcggggattacaggtgtgagccactgcacttggcctttttttaaaatataaaataataattttttaaaaagtgtgtttttttcctgcctctcagtaaattgtcttgtggccctgcatggaacgtgtactttgatctggagactaggtgctctagacaccagtgaagtacagaactctttctgatatgcatatcagataccacgaaggaacatactacttttggcctggccaacatggtgaaaccccgtctctactaaaaatacagaaattggccaggtgtggtggcgggcgcctgtaatcccagctacttgggaggctaaggcaggagaattgcttgaacccgggcgttggaggttgcagtgagccgagattgcaccagtgcactccggcctgggcaacagagtgagactgtctcaaaataaaaaacaaaaacaaaaacaaaaagtggcacaatcatggctggctacatacagccttgacctccctgggctaaggcgatccttccacctcagcctgccaagtagctgagattacaggcatgtgccaccatacccaactaatttttgtattttttgttgagatggggtgtcactaggttgcccaacctgggctggagctcctgggcacaagtgatctgtccgcgctggcctcacaaagtgctgggattacaggtgtgaactaccatgcccagcctgaaatttgtttacatagaaattgtaaaactttttgggccaggcactcatgcctgtaatcctagcactttgagagaccaaggtaggaggattgcttgaggtcaggagttcaagaccagcctgggcaacatggtgatggtgagactctgtctctacaaaaactaaaagaaatagctgggcctggtggtgcctgtagtcccagctgttcgagaggctgaggtggaaggattgcttgagctagggagtttgaggctgccatgagctatgatcgcgcctctgcacaccagcctgggttacggagtgagactgtctcaataaataaataaaactgtcacagtaatttttttgtggtaaaatatatgtaacacagaatttaccattttaatcattcttgactgtacataccttcactgacataattatgttcatgttgttatacaacctcatcaccattcatctccagaactgttttcatcttcccaaattgaaactccgtacctgttaaacattgagtccccgtgcgctttctccccagcccctggcatccaccgttctctctgtttctataaatgtcactactctctggatcttatatgactggaatcatacagtatttaccttactgtgacaggcttatttcaattagctcatggtgcagcatgcgtcagcatgttcttttttttttttttttttttgagacagagtctctctctgtcacccaggctggagttcaatggcatggtcttggctcactgcagcctccgcctctcgggttcaaatgattctcccacctgagcctcccaagtagctgggactacaggtgtgcaccaccaagcccagctaatttttttttttttttttgagacggagcctggcaccgtcacccgagctggagtgcagtggtgtgatctcggctcactgcaacctccacctcctgggttcaggtgattctcctgcctcagcctcccgagtagctggaactataggcgtgtgccaccatgtctggctaatttttgtatttttagtagagacggggtttcatcatgttggccaggatggtcttgatctcctgacctcgtgatccactcgcctcagcctcccaggatgctgggattagaagtgtgatttttttgtatttttagttagagatgggatttcaccatgttggccaggctggtctcgaactcctgacctccagtgatccacgtggctcggcctcccaaagtgctgggattacaggcatgagccccggcgccccggccagcatgttctcagtttaaggcaggatgagacttgactctttggtgtgtgtggaccgcattcgctcatctatgtagaccgcattcgctgacctgtttattcgctgacggacacttggaccactttcaccttttgactattgtgaataatgctgctgtgaatacgggtgtacagatatttgtcagagaccctgctttctattctttcttttttaataaaaattttatttatttttttttgagacggggtcttgctctgtcacccaggctggagggcagtggcgtgatctcggctcactgcagcctctgcttcccaggttcatgtgattctcctgcctcagcctcctgagtagctgggactacaggcatgtgccaccacgcctggctaatttttgtatttttagtagacacggggtttcaccatcctggccaggctggtctcgaactcctgatcttgtgatccacccaccttggcctcccaaagtgctgggtttacaggcgtgagccaccacgcctggtcaaaaattacacttttttttgtagagacagaatcttgggaggctgaggcaggaggattccttgagcccaggagctggaggctgcactgagctatgattgccactgcactcctgcttgggtgacagagtgagaccctgtctcaaaaaaataaataaaaatatagatcttggacagacgcggtggctcacgcctgtaatcccagcactttgggaggccgaggcgggcggatcacgaggtcaggagatcgagaccatcctggctaacacggtgaaaccccgtctctactaaaaatacaaaaaaattagccaggtgtggtggcgggcgcctgtagtcccagccactcgggaggctgaggcaggaggatggcgtgaacctgggaggtggagcttgcagtgagccgagattgcacaactgcactccagcctgggcgacagagcgagactccatctcaaaaaaaaaaaaaaaatagatctttttccatacagaagaaatttgttattatcacaaggtgttgtctgagtgaaatgaaggctgttttccttctccttctgactgctctctcagggttgtgggaggggcaccagggaccctctgagaactttgttttgcacctggtcatgtccagctgactcttagcttggcctgtctcacaggtgtctgactccgtgagtggacagaccgtcgttgaccccaaaggctacctgacggatttaaattccatgatcccgacacacggaggagacatcaagtgagtgctttgcagaatcgctgggctgggatggagactctagttgcctagggtattttggattttatatggacagtatgctgtcaaaatgggacatggcggttctaagaaatgtaaagtggagtagtttgttttttccatttgaaatgtatctgtatccattcattgcgtacactcaatgtgttacatatgatactgcaaagtccctgcctgtgctgggcaggaaagcagctggctgtgtcccacatgtcccatctggaccttcggttctcagcgtttgtctgcggggaggctacagaggcttggaatagtgcgcactgaggttttgagttggtttttgtaactcaggacatcaggactgatagttcttacattgtgactgtgaagtgggtgccctcatcccaggtctcgggtgcacccctgacagcatggcctgatgccgtgtgcactctccctctcatagtgatatcaagaaggcgcgactgctcctcaagtctgttcgggagacgaaccctcatcacccgccagcctggattgcatcagcccgcctggaagaagtcactgggaagctacaagtagctcggaaccttatcatgaaggggacggagatgtgccccaaggtgaggtatttcctgggaggcgtttcctgggaggctgcgtgattgtggcccctacgggagtaaacttgttagagcaaatctctttgtcttttggtattgaaactacagacaatagggcaggctgggggaggatgtgaaaagcagccaagggctttttcctgcttgttttcatgtggagtgaaggctaatccaccactttttttttttttggagacggagtctcgctctgtcacccaggctggagtgcagtggcacgatctcggctcaccgcaagctccacctgccaggttcacaccattgtcctgtctcagcctccagagtagctggcactataggcgcccgccaccatgcctgaatccaccacgcctgaatccaccactggtttgacggcaggctaagcttcattataaagagctcagttggtcagctcttcacccgcctaatggtggccagtcacggtggctcacgcctgtaatcccagcactttgggaggctgaggcgggtggatcacttgaggtcaggagttagaaaccagcctggccaacatggcgaaaccccgtctctactaaaaatatgaaagttagccaggcgtcgtgacaggtgcccataatcccagctattcggtaggtggaggttgcagtgagctgagattgcaccatgctgctccagcctgggcgacagagcgagattccgtctcaaaaaaaaaaaaaaaaacaacaaaaaagaacgacccgagcagatgtgcagtctctgctttgtccatggagttgtcctgaaggaaatcatgctcttttcacaaagtggtgtttcattttttttttttctttttttttgagtctcgctctgttgcccaggctgaagtacagtggcgtgatctcagctcactgcaacctctgcctcccgggttcaagcaattctcctgcctcagcctcctgagtacctgggattataggcacctgccaccacacccggctaatttttgtagttttagtagagacagggttttgccatgttggccaggctggtctcaaactcctgacctcatgatccacctgcctcggcctcccaaagggctgggattacaggcgtgagccaccgcgcccggccattaggtgttcttcagtcagacatatggtagccatgttcccaagtgtggttataagggggcgactcctggtgcaggtgtgttagaggctgagctaattggctttcgtaaattctggggcccgaggatctgctctggagatctgtgcctgctgccctgttgcggcttccagcctgcactgagccttattggtcttatctcttgcctcacagagtgaagatgtctggctggaagcagccaggttgcagcctggggacacagccaaggccgtggtagcccaagctgtccgtcatctcccacagtctgtcaggatttacatcagagccgcagagctggaaacggacattcgtgcaaagaagcgggttcttcggaaaggtgagcctccctcggaggtgctgctttctccctccttggggcccctcctctcagcagctttcctgctcctggctcaggcttttggtgagagtggataaggaaccagggacatttttcaggccttttctcaggctgggttgcctctgcccttggacccccatgggggagggatactgtggtgggcaagttcccatcctggaagggatgcttgggttgagccctcactcctgcctttttccagtgtgtgatcttggatgcttgggcggtcactctggtccaggcttccctcatctgcagggtgagaacaacggtagctcaaagcctgtgtcctggggctctggagatggtctgtgtgaagagctgagccggcacctggcacgtgcagacccgttgtgggtgttactcattttctctcctgagaaggcaccagagccacacgttgattgaactctttcctgctgctgacgaggctgtgccttctgctcccgcgatgcagcgtgtgccgtcagctcaggtcagataacgacagacggtgtgcctaccaggcaacctgattccatccagggattcctgccagggtagagcttttgtgggtagtttgtttatttttattactgtggattcataaaaggagcactgtttctcctgtcactggaagtgtgtagtagatgctgctcttgaactgggtccagaacgagtgctagtcagggggctgttctgaagctaatctgtgcaggtggcttcttttttttcattttttgttttttttttctggttttttttttttttttttttttgagatggagtctcgccctgtcgcccaggctggagtgcagtggcgtgatctcggctcactgcaagctccgcctcccgggttcacaccattctcctgcctcagcctcctgagtagctgggactacaggcgcctgccaccacgcctggctaatttctttttgtatttttagtagagatggggtttcactgtgttatccaggatggtctcgatctcttggccttgtgatctgcctgcctcggcctcccaaagtgctgggattccaggcgtgagccactgcacctggcctatgcaggtggcttctatccatttttttttttttagacagagtctcgctttgtcgcccaggctggagtacaggggcacgatcttggctcactgcagcctctgcctcccgggttcaagtgattctcctgcctcagcctcccgagtagccgggattacaggtgtgcgcctccatgcctggccaatttttgtatttttagtagagatggggtttccccatgttggccgggctggtctcaaactcctgaccacaagtgatcctcctgccttggcctcccaaagtgcagggattacaggcgtgagcccctgtgcctggccttttcttttcttttttttttttttttgagatggagtctcactttgtcccccaggctggagtgcaatggcaccatcttggctcactgcaacctccgcctcctgggtttaagcaatcctcttgcctcagccttctgaggagctgggactacaggcacctgccaccacgcctgcttaatttttgtatttttagtagagacggggtttcactgtgttgaccaggctggtcttgaacttctcacctcaagtgatccacccacctcgacctcccaaagtgctgggattacaggcgtgagccactgtgcccggccagattttttttttttttttgagacagcgtcttgctctgtcacccaggctggagtgcagtggcacgatcttggctcactgcagccaccacctcccaggctcaggcgatcctcccagcttagcctcccaagtagctgggagtataggtcccacccccatgcccagctatttttaatttttggtagagatgggatcttgctgtgttgtccaagcttgtctcaaactcccatcctcaagtgatcctcctgccttgatctcccagagagctgggattacaggcatcagccgtcgcatccagcctattcttcctgaatttatagcctaggaaaaataaagtgtattttatggaatcaagggcagttttcagtgagagctttccagctcttgtttttccaaatgtctttaagcgaaatatcccattgaggcttctgtgctgataggaccgtgcagatgagggctctttggtagaaagccccttatcaaatatagtttcattcacttactgtctacgtctgttagaagacaggtgaaggctgcttgcctgtgatgcatgttcccccgaccctgtgcactcacatgtgaacgtgctttcctctgtcgaggctggtttcttgaccgcagcccagctgctcagtgaatgctcagagacagcctcttttatttttttttattgagacagagtctcgctctgtcgcccagcctggagtgcagtggcacgacctcggctctctgcaagctccgcctcccaggttcacgccattctcctgcctcagccccccaagtagctgggactacaggcgcccgccaccaggcctggctaatttttttttgtatttttattagagatggggtttcaccatgttagccaggatggtcttgatctcctgacctcatgatccacccgcctcggcctctcaaagtgctgggattacaggcgtgagccaccgcgcccggccagagacagcgtcttataatgaggtggccaggaacagaaagttagcacctgtctgggtttgtagaaatcagtttatcttttttcagctaggaagaaatagttctttgatgaagagcccatgaaagtctgggtaattagtattgtttacttagaaaagctctattgaattcttcctgccacagtttgatgaatgatcatgaatgtctttgtggccactccctgctcaccaccagattgtctgggttcatttccagttggtttggatttggagatgggagtatgctgttggaggcgggggccttcggggagtgttgagggactgtgtttccacggctgttctctcagggagtggcctcctggctgtgctctctcaggcagagaagctgggctaaggtggaatgaacccaggatctccaggatggcctttgccgctgccctaatactggtcctggcctgccctttcccaagagtgtttccaaaaactgtattcttttcctggggtgaagcccagcactgcttcatttggttattagcaaacacttacacgttgcttgaagggtctggtttttgaaattaagatgacagctacttccactggtgacttaggacacctgccagccagggagcctggcagtgcatggtctctgtgagctctgggtcgctgttgggctgagctgacaccttagtcctttgttgggagaatgggcgttttgggtgctgatcttgagacctgaggaggctgagtaaccttaggcatggtgcttggcctctgagcttccatgtcttcctctgtaaaagggaagagggctttcaggattggggagggtgcagcatgtgagcttcctggccagggtggggtgtcccacgtgcagagtcccctggggaggcccgactggcagctcccctacaataatgcactcacatgctgtgtactccgctagttaatgcagatgtgtggaagtggagttattttacactaacgccatatgctctggcctgtgaagcgtggcatccttcagtggccgtcgccagcgtgtccctctgggggcacaggaatggcacagttcaggttgagggtcttccctgcagtcacgtgacccccggagagcatgttggcctctgcacggtcacgtcttcatggctgtgtctagcattcagaatactcttctgttctaggccaacttcaggggtgtgtgcttcctccacttctgctcataaagtcacactccttgaaggccattgtatcatggtgtgccatgtggcttccgaaagcacctggggaaggtgaccttgttggttttagtgccatgcctgtgggctgctgatgagatgccatggagatatgtcagctctctcccaaaacttgaagacacagagtcctgggagtcgtaagttaatgactccataaattgagtcccgcatgaatattctgttctttagagacgcgaagttcatctccaccaatgtacaaagtattaagggaagtagttcatatttagacaaatagagcactcatctcccacgcagtcgaggtgagagcgcacaggaaaaacaactgggtcgttctgtgtcttctctctatgcctagtcgcctggttggaggttaggactttccttctttactgctgtgccctctgctgtcaccctgcttggtcagggttcttgacctggatgagtaacccaaatcttttttttgttttagacagagcctcgtcctattgcccaggctggagagcagtgttgcaatcagctcactgcagcctcaacctcctgggctgtagtgatcctcctgcttctggctcttgagtagctgggaccataggtacatactaccatgcctaaataatttttattttgagacaggatcttgctctgttgcctaggctggagtgcagtggcatgatcatgggtcactgaagcctcaacctcccagactcaaactatcctccagtctcagcttcctgaatagctgggactccagggacataccaccatgcctggctgagtttttaatttttcaaagagacgaggtctccctgtgtcatccaggctggttttaaactcctgggctcaagtgatcctcccacctcagtctcccaaaatgctgggactgcagatgggggccactgtgctcagccaggacccatatctttatccccaaagggtctgacttgttggtagttttgcttttttggtggctgtagttcccattaacttttactggtaaaagcagaaatactaaactgtttttaggactggcctctagatagtctcccacagtgggtggcagcaactcagtctcgctttgggagtcagggttagcctctccagccagggctggtacatgaggaggccagagggagctgtggtctgcaccctggttggcacatactccctttggagtagctcgtagcttgctcttttttttttttttttttgagactgagtcttgctctgttgcccaggctagagtgcagtggcgcaatctcggctcactgcaacctccgcctcctgggttcaaggaattctcttgcctcagcctcccaagtagatgggattacaggcacctgccaccacacccgactaatttttgtatttttaatagagatggggtttggtttcactgtgttggccaggctggtctcgaactcctgacctcatgatccacccgcttcagcttcccaaagtgctgggattacaaatgtgagccaccacacccggcctttggaccagctctcttgacaggagggtccaaggaggcggagacgggactcttggcagtggagacgggacttgtggcagcggagatgggacttgagccattcagacatcactgtttattcctagacccgtgtgttctggctgtgagatccagccgggattggtgtctattcacagcatttgtggcatcctactgggctgccaggccatggctctgagtgatgggcacatggtaagaccatgttctgcctgaatcggtgaattcatatagcttcgtcttctggccgtctttcagttggtcaagtggacatccagataataaggccaggggtgtcagtgccagtgtgctgtgcagaaccatgcgtaaaccacagcagacttttgtcttctcagtcccttgaccctaagggactccccagaggttgtcagtgtgggctgagggaggaaagcggttgagcagccaccagtgcaggaggcatctgccccatagcttaggcagctgtgctgcacctgccttccttccacaccatctcctgggtgccatttccaccctatgaggccactgctgcatctgcccaaccttgtggcttggtctgtcagtaacacctggagtgggcagcaggttgctcagtcattttatgtcccttagctgagtgttcattccctgccagggcctcacagccagcctggggctgtttctcagcaggagagcaggtacctgcaggagagctagctcacttgccctctcccctccccgcctcccctcccctctgcctcccgtcccctcttcccctccccgcctccgcttccctccccgcctcccctcccctgccctgcccttttcctcttttttttttttttgagactgagtctccctcttttgcctaggctggagctggagttcagtggtgcagttttggctcactgcaacctccacctcctgggctcaagcgattctcccacctctgcctcccagctagctggaaccacaagtacatgccaccacgcccagctaatttttgtattttttgtagagacagggtttcgccatgttgtccaggctagtctcgaattcctgggctcaagcgatcctcccacctcagcctcccaaaatgctgggattataggtgtgaaccaccacaatcagctgcctggcctaatttctttttcttttttttgagttggagtctctctctgtcacccaggctagagtgcagtgtcacagtctcagcttattgcacctgcgccttctgggttcaagcgattctcctgcctcagcctccccagtagctgggattacaggtgcatgccaccatacctggctaatttttgtatttttagtagagacaaggtttcactgtgttggccacgctggtctcgaactcctgacctcaggtgatctgcccacttcgacctcccaaagtgctgggattacaggcgtgagctacgggctgtacctggcccggcctaatttcttaacatcattaaatgtctactgcattcatatttttccagctgtcatgtcagtacctgcacgggcacatgcatgcataaccacatgcacacatggttggtttgaatcaggatctaagcaaagtctgaacattgccgtttggttgatgtcttctctcggtttgttgatggaattgggttgtttttccttgagattcctcacatcagggtttgctcactgcagcctgtgagattgtttcatgtgggtctcgtttcctgtatcctctgtttcctgtatcctcttgtaaattggaaggtagatttggagactcataagagtaagctttgtgttttttttttctttttttatcaaggaaatattcgtggcaatgcaagcagcgtcaggagctgcagaggctgtcactgctcagtggccccagtgtccttcatggagttctccacagcctttcagctcctgcctttggcagtggctggtgacccgtgcccgcatctgttccttcattagggtgtgcaaaacggtgacattataattaggtcactctttgcttttattgccagaattattcttaagagaagaattttcctatatccatgatttggttattctgagtttatttgggaaagacagaatagatatttgatttgcttcctttcaactttcgggatgatgcgttgattctctagcattctccaaaggtgactaatggtctcttggagctttgttatgaactattgaatgctgtggtatttcatgggtttgaatacattgcaggtaatattcttaatatgcttattgaccttcagactctctgatcattgtccagtggaagtctcttctagtttgctcttgaattttttttaagttttaggtatttttatttaagggaaaacatgtaataatgaggtattttaggtcgggcgtggtggctcatgcctgtaatcccagcacttcgggaggccgaggcgggcggatcatgtggtcaagagatcaaaccatcctagccaacatggtgaaaccctgtctctgctaaaatttcaaaaattagctgggtatggtggctgcacgcctgtactcagctacttgggaggctgaggcaggagaatcgcttgaacccgggtggcagaggttgcagtgagccgagatcacgccactgcactccagcctggcgacagagcgagactccatcgcaaaaaaaaaaaaaaaaaaaaaaaagagaggtatttcagacactggcattttttcgtaaatatttgaagtgaattacgtagatcttaagtgtgcagtttgatgtcttcacaagtgcatgcacccctgtaacccacactcgaccaaggcatagagcatttccagggtgggcaccgtggctgacgcccataatcccagcactttgggaagccgaagcgggcggatcacttgagatcaggagtttgagaccagcctggccaatatggtgaaaccccgtccctactaaaaatacaaaaattagccaggcgtggtggtgcgcacctgtagtcccagctaccttagaggctgagacaggagaatctctgaacccaggaagcggaggtagcagtcagctgagatcgtgccattgtactccagcctgggcaatagaatgagactctgtctcaaaacaaaaacaaaaacatttccatccccgcagaaagtcccctggtgcctctcaatcaatccatactatccccattcgttggcagtcatgcttctgacttattttaccaagattagttttgcctcttttcagacgtcacataaagggagtcatatagtataaactgttttgggactggtttcttttgttcagcatgtttttgaggttcattcccgtggtcactggtttcctgagtcctgttgatatgaccctggcagtcttcagtcacttccttgctttctgctaccacaagatgctccgtttgtccttgtttgtgtctgccccagacctgaaggaagccacataaagggcaggtgtgtggtccctgactgtcaaccagggaagtccgtctcatcctgaccagcagcatgctcaccacatgagcctcctgtttttatctccttttctgtgacgtggtttctcgtttgacctttcctagccctcgagcatgttccaaactcggttcgcttgtggaaagcagccgttgagctggaagaacctgaagatgctagaatcatgctgagccgagctgtggagtgctgccccaccagcgtggaggtgagtctggcgggctcagggccaccagagcccaaagtggccaaggcctgagcccaggttcagtgtctggaagtgatgatacaagtggagcattgagctcactcaggctgcaatttctgggagcagaaggccctgtggaaccccaggatgccgttctgtacatagccgctaggcagggtggtcagtggcctcagctagctgtgctcttaatggacgtgcagggagaatcttagctcatacctgaccactgcagaaaattctctgttgggcagttgctcaggggccatttcctctcagcagcccagagtttgtcatgggagccgaaggtggcagcgtgatagaaaacattgctttctgtcagctccgcatgactgctctttgcctctaagctaagtgggatttctttggttttaagcattccagttcacagcattctgtgcagtgatttttagtcttggttttatgatacctagtatgtctttaattatcctaaggggtattgtgaaattctccaaacaacattaatcttattttatttacataaaaatgaataaagcccgtacacatcttagggatggaatgctgcagaaccaagggtctgggaacttcaggaggctgaacacccttctgtgtgtttagcctgtgagggcagtagcctcatcctgctcgtctgtgccagcccctggtatcaggtctggcgtgctgtgtgcctggaggctgtgtttgtgaacattcaactgagaatcttttgatgctcacgagagtcactaaatgagtcagaagcataaaggaacagttggtcaggtgagaagtgctgctgtggacacttctcaggccatgttcagatggttctcgagagctaagaaagaacgtggtggccaacgctggagggtgggtcgctgtctggcctgcagctgtccccccagcacagtgtcctctcctttttctcgtgtcctctccgcgtagctctggcttgctctggcaaggctggagacctatgaaaatgcccgcaaggtcttgaacaaggcgcgggagaacattcctacagaccgacatatctggatcacggctgctaagctggaggaagccaatgggaacacgcagatggtggagaagatcatcgaccgagccatcacctcgctgcgggccaacggtgtggagatcaaccgtgagcagtggatccaggtgggccgcaggcgggtgtcgtggtgtctgctttaacagtgcacatgcagcacgtgagagtcccacgcaggactgggggttgctggatggtactggggagtcctgtgccaaaccagaagcaggcacaggtgtgaatgggccctgagggacctgggcatgcccactgtcgctcttgatggattcaggcctggagttcgtcttggggtgaacacttcagaagccctttcagtgtgtgcacacctgactgcatttctttgctagtagaaatgatacacctacgagaggaggacaggaagtctcatggcttctttctttgctagtagaaatgatacacctacgagaggaggacaggaagtctcacggcttctttctttgctagtagaaatgatacacctacgagaggaggacaggaagtctcacggcttctttctttgctagtagaaatgatacacctacgagaggaggacaggaagtctcacggcttctttctttgctagtagaaatgatacacctacgagaggaggacaggaagtctcacggcttctttctttgctagtagaaatgatacacctacgagaggaggacaggaagtctcacggcttctttctttgctagtagaaatgatacacctacgagaggaggacaggaagtctcacggcttctttctttgctagtagaaatgatacacctacgagaggaggacaggaagtctcacggcttctttctttgctagtagaaatgatacacctacgagaggaggacaggaagtctcacggcttctttctttgctagtagaaatgatacacctacgagaggaggacaggaagtctcacggcttctttctttgctagtagaaatgatacacctacgagaggaggacaggaagtctcacggcttctttctttgctagtagaaatgatacacctacgagaggaggacaggaagtctcacggcttctttctttgctagtagaaatgatacacctacgagaggaggacaggaagtctcacggcttctttctttgctagtagaaatgatacacctacgagaggaggacaggaagtctcacggctttctttgctagtagaaatgatacacctacgagaggaggacaggaagtctcacggcttctttctttgctagtagaaatgatacacctacgagaggaggacaggaagtctcacggcttctttctttgctagtagaaatgatacacctacgagaggaggacaggaagtctcacggcttctttctttgctagtagaaatgatacacctacgagaggaggacaggaagtctcacggcttctttctttgctagtagaaatgatacacctacgagaggaggacaggaagtctcatggcttctttctttgctagtagaaatgatacacctacgagaggaggacaggaagtctcatggcttcttttactcttcccctctcccccacaccctttttttttttttttttttgagagggagtctttctgtcacccaggctagagggctagagtgcagtggcacgatcttggcttactgcaacctccacctcttgggttcaagcagttctcctacgtcagtcacctgagtagctgggattacaggcacccgccaccatacccagctaatttttgtatttttagaagagacagagtttcaccatgttggccaggttggtctcgaactcctgacctcaagcaacctgcccgccttggtcttccctgtcttttatctttgtctgtagacttaaggctatagaaaagtttccaaagatgatctaacttaggaagtagggcttgggttccctctaatgccttcttttaaggagtcacccactgagttatgtttctctcaagaaaaataaataatgaaattactattttctgttatattttatgacagtttgtctttctttccttccttcctttcttcttctttctttctttccttctttctttcttgagacagggtctcgccgtgttgctcaggccggagtgcagtggtgcagtcatggctcactgcatccttgacctgggctcaagcaatcctcccgccttaacctcccaagtggctgggactacaggcgtgtgccaccatgcttggccaattttttttatttttattttttgtcttgttatgctgcccaggctggtcttaaactcctggccttaagcaatcctgccacttcagcctcccaaagtgttgagattacaggcatcagctgccatacccagcatatgacaggttattaagctataactagcgttctacagaatccacccatttaaagtttacgattcagtggttttagtatattcacagagctatgcgctatcaccacaatcctagaaccttctcatcaccccagaaagaaatcctgtgtccgtgagttgttgctccccattttcatacctctgtagccttttgtttttgtttttgttttttttttgagacagggtgggtctctgtctcccaagctggagtgtatggtgcaatcaatcttggctctctgccacatttgcttcctgggctcaagcaattctcctgcctcagcctcctgagtagctgggactacaggcatgcgccaccacacctggctaatttttttctattttttgtagagacgcggttttgccatgttgttcaggctggtctcaaactcctgagctcagatgatccacctgcctcggcctcccagagtgctgggattacaagcgtgagccaccgtgcctgtctaaccttgtttttttactttctttctctacacatttttttctggacattttatatacagatgttcaacttatgggcttatatcctgataaacccattgtaagttgaaaatatcataagtctaaaatggatttgaggctgggtgctgtggctcacacctataatctcagcacattgcggggctgaggcgggtggatcacttgaggtcaggagtttgagaccagcctggccaacatggtaaaaccctgtctctactaaagatacaaaaaaattagccaggcatgatggtgggcacctataattccagctactcgggaggctgaggcaggagaattgcttgaacctggcggaggcagaggttgcagtgagccgagatcgtgacactgtactccagcctgggcaaaagagcgagactctgtctcaaaaaataaataaaataaaataaaatgaaataaaatgcgtgtgatacacctaacctactgaactttacagcttagcctgcctacgtcaaacatgctcagaacacctaccttagcctacagttgggcagagtcatcgaacgtaaagtgttgaataactcacgtaatttattgaatgctacgatgaaagtgaaaaacagactggtggtttgagtcaaagtattgcttctactgagcgtggtggcttttgcatcgtccgacaccgtgagtggaatcacacgacacgtggtcttttgtgactggccttaacttagtgtgttttcagggttcctccatgttgtagcatggaggtattgaaatcctttgcctacttttacattggattgtgtctttattatggtctatgtattatttttgtctgttgttttattattgagttgtaagagatgtttttatatattctggatatattgtcacttatcagagacatgatttgcaactacagatggtccctgacttcccatggtttgacttttgccgtggttcaaaagcagtttgcattcagtagaaactgtccatggaggaagagccagcgcagtttgcgttcagtagaaactgtccatggaggaagagccagcacctttgccgcaggcccctgagggtctgggtgctgggtccttgccccacgcattcttctcaccactgacctttgtgccagcgtctctgcctcagatccttgctcttggctctgctttctgtctgggatggttttctggtgctggcagggccctgggagggtctgggaggcatgtggctccggttgcactttgctcacggtccatgtcgtggtcccccatgttggcatgccgcagtggtgcctgtgctcctgcaccctgttgctctggctgggttattgttctcttgttggtagacacattctcttgcacacatgggaatatatttgtcacatgaatgccttaaagtagaactgctgggtcaaatatgtgcctgttttattttgatagagaatgagaaattgccctccatagagatatgtgcttctttgcagtataagatttatgcccccttcaccaagtgagccagtcagcacatgtttcaatgttgctcatctgatacgtgcacaatggtacttagaatagtttaattagcatcttgaaaataagaataggggctgggtgtggtggcttatgcactaatcccagcactttgggaggctaaagcaggagggttacttgagaccaggagtttaacaccagcctaggcaacataaggagaccctgtatctatgaaacataatgtaccattgagcatggtggtgcatgtctgtgctactcgggaggctgaggtgagagtatcccttgagcctgggagttggaagctgcagtgaactatgattgtaccacagcacttcagcctgagtgacagggagagaccttgactctctctcttttttttttttttctgagacgtagtcttgctccgttgcccaggctggagtggagtggcgtgatcttggcttactgcaacctccgcctcccgggttcaagtgattctcctgcctcggcctcccgagtaagctgggattacgggcacccaccaccacgcctggctaatttttgtattttattttttagtagagacagggtttcaccaggttggccaggctggtctcgaactcctgaccacgtgatccaccctcgacctcccaaagtgctgggattacaggtgtgagcccccacacctggctgagaccttgtctcttaaaaaaataaaataaaaaggctttacatttcttttcacatgtttgaaagttgtttgtatttttattttctagtgaacagtgtgcctatgtcctttgtgacatttctctattgttttttctgattggcgtgcagtagactcacttcctcagatccccagtaggcagtgtcagcatcttgtgctgatgtctgtcagttttaaccgttcaggaactccgtactccccgttgggaatctgcagctctgatttccaaaatcacaaataagttttgtgttcctctttcaggatgccgaggaatgtgacagggctgggagtgtggccacctgccaggccgtcatgcgtgccgtgattgggattgggattgaggaggaagatcggaagcatacctggatggaggatgctgacagtgtgagttggcaacaggggcctttgtccgtaatatggagtctctgcttgtgggaacagcaggcaccttataaactactaggctattttaaaactctttttttttttttttaaatctgagacggggtcttgctctgtcgcccaggctggagtgcagtggcgctatctcagctcactacaacctccacctcctgggttcacgccattctcctgcctcagcctcccgagtagctgggactacaggcatgtgccaccacgcccagctaattttttgtatttttagtagagacggggtttcaccgtgttagccaggatggtcttaatctcctgacctcgtgatccaccccgccttggcttcccaaagtgctgggatcacaggcgtgagccaccgcgcccggcctcccagagtgctgggatcacaggcgtgagccgccatgcctggcctcccaaagtgctgggatcacaggcgtgagccaccgcgcccggcctcccagagtgctgggatcacaggcgtgagccaccgcgcccggcctcccagagtgctgggatcacaggcgtgagccgccgcgcccggcctcccagagtgctgggatcacaggcgtgagccgccctgcccggcctcccagagtgctgggatcacaggcgtgagccgccgcgcccggcctcccagagtgctgggatcacaggcgtgagccgccgcgcccggcctcccacggtgctgggatcacaggcgtgagctgccgcgcccggcctcccacggtgctgggatcacaggcatgagccgccgcgcccggcctcccagagtgctgggatcacaggcgtgaggcgccacgcctggccgcagatttgctttcttactctgttcgctctcatgcacttacctcttatttttttttctggaactgtttgacaatgaatgagttgcagatgtggtgccctttaccttaaacactttggtgtgtatttctttaaaagaggacgttctcttacacagccatagctcagttatcaaaatcaggacattgatgttgggacagtgctgtcaggtaacttcagaccttactcaaatctcacccacaggctgggcatggggctgacgcctgtaattccagcactttgggaggccgagatgggcagatcgcttgagctcgggagtttgaaaccagcctgggcaacatggcagaacaccatctttacagaaacaaaagccaggcatggtggtgcacgcttgtagtcccagctactcaggaggctgaggtgggaggatcacttgagctcaggagtttggggccgtagtgagctgtgattgcgccactgcacttcagcctgagtgacagcaagaccctatctcaaaaaaagaaaaagtctcacccgttgtctctgtgtccttttagcagaagaaaaaaccaactgtcttctgtgaggaatacagggtcatcctcaggctagtctggaagagagcctcagcctttgttgttcctgagtgtgaattttttgaggaccacgggccagtgatgctgtagactcctctttcatctggttctctgtggtgtctcctccgggttgggttgaggcttcttggtgcatcatacggagaggtgtgcacctgttcaactccgaccgtctggtgcgggcagtggccgcaggtgtttccactgtatggttgctgtttgtttctttgttattattaataagtattttgaggatccattaatgatgcttcttggcctgaatcagttatttctgtggtgtttgctaaatggtgattttttttaaatctttttttatatattaaattttttttgtagaaacagtatctcactatgttgtccaggctggtttcgaactcctggcctcaagtgatcccacctcagcctcccaaagtatgtaggattacaggcgtgtcactgtgcctggtcacacctgcataatgattttgtgaacagtttctcttacattttattagttggaattctacagtaacgaagagcttcactttctccttcatccgtgtgcgttcacttccttccatctggattggtcaatggctcctcctttggtccttggaatcagaccccactgctggcattgaccgtgtgatacacacatgattcttttgcaccccgtgtggcgtgacccagagcttgtgtgccggctgggccatcctcctgccccatgtatgctaaaatacacacatcaatccttaggtgagttaagacgcagggcagcggtaatagtttttgttgttggttttttttttttttttttttgggacagagtctcactctgtctcctaggctggatggagtccagtggcacgatcttggctcactgcaacctccgcctcccaggttcaagggttcaagcaattctcctgcctcagcctcctgagtagctgggactacaggtgcctgccaccacacctggctaatttttatattttttatagagatgaggtttcgccatgttggccaggctggtctcgaactcctgacttcaggccatccacctgcctcagcctcccagagccactgctcctggcctgtttttctcttattattttgtcatctctttcacatacactggagtaagcacagctgtttttcaaagtgctcgtgatgctagagtaaggaggacagtgttttctgtgcccagaagtgtgctgtggtgctgcttccctcccggacaccagggccctgggcacagcatcacttgatcctgtgggtgttcaggccactctcgggttgcttgtgaaggtccaaggaggcgatggagaatctgaaatgctttgtcaccaaccctcaggacttggatcagaaatcacagagaggggcatagaccagagtgctctatccagggcctgaccctcaccggcatcctccctgaccccctcagatgctcctggtcaggacacagtgcctgaggcagggcccttgctggtttctgtgctggttgagtcagactgaagccatgtgacttgggaggcatcaggtctgagtgaagaaatctcagtgacatccccactcctcgtcctcctgacccattttcatgctggggctccttaactgggaggctcactgttgtcccttcctctcgtagaaggcagctgttcctctgggaactgttcttgggtgcccctgtgtggggacttggacagctttgagctgccagtccagatctttgccattgtcatgttcatagttgcaaaactttgttcctgacccacttcctggtggcctctcacttaccttcagcaacaaactccttcttggtacaagaatcctttcagcggccgggcgcagtggctcatgcctggaatcccagcacttttgggaggccgaggtgggtggatcacttgaggtcaggagttcgagaccagcctggccaacatggtgaaacctcgtctctactaaaaatacagaaattagctgggtgtggtggcaggcgcttgtaatcccagctacttgggaggctgaggcaggagaactgcttgaacctgggaggtggaggtttcagggagctgagatcgcgccactgcactccagcctgggtgacaaagcgagactctgtctttaaaaaaaaatcctttcagcatctgcagggcgcagaggacggtgacttgcccctgtgtgaggctgagtgggaacaggtgtctgaacctggcccagtgagtctccaggtgtcatgatcgccagtcagacgaacccccagaggctttagcgctgcaaatggtgactggcttttttgttttcttttgttgttgatgctaaccaaaagataaagtcattcttgagtatagggaaaaaaaagcctgaagaaaatagaactgtgtttactgtagttctgttgagtggatgggttttttcctgtttgtattcacttgtcttttacaggtttctaattaatgtaactttttatcgtggtaaatatatactatacctaatttttttttttttttttttgagacaaggtctctctctgtcgcccaggctggagcgcaatggcgcaatcttggcaccctgcaacctccgcctcctgggttcaagcaattttcatgcctcagcctcccaagtagctgggattacagccatgcactaccatgcccagctagtttttgtatttttagtagagacagggttttaccatgttggtcaggctgatctcaaactcctgacttcaggtgatccacccagcttggcctcccagggtgctggaattacaggcgtgagccaccgctgtagccactatacctgatttttaaaaaagaaaccaatatgtttgatctgcagttacagcatgtgtgtgtgtgtgtacacgtacatatgcctgggccacagccctctgtgtgtgtgtgcacttgtatgtgcatatggctcggccacagccccatgtctgtgtgtgcgtgtgtgcgtgcacgtatgcctatgccttggccacagccccgtgcgtgtgtgtgtgtgtgtgtgcatgtatgcatatgcctcagccacagccgtgtgtctgtgtgtgtgtgcgtgtgcatgtgtgtgcatgtatgtatatgcctgagccacagccctgtgtctgtgtgtgcgtgtgtgtgcacgtatgcatattcctcggccacagcccccgtgcatgtgtgtgcatgtatgcgtatgcctcagccacagccctgtgtctgtgtgtgtgcatgtatgcatatgcctcagccacagccccgtgtctgtgtgtgtgtgtctgtgtgtgtgtgtgcacatatgcatatgcctcagccacagccccatgtctgtgtgtgcgtgtgtttgtgtgtgtgcgtgcacatatgcatatgcctcagccacagccccgtgtctgtgtgtgcgtgtgtgtgcacgtatgcatatgcctcagccacagccccgtgtgtgtgcgtgtgtgtgtgtgcacgtatgcatatgcctcggccacagccctgtgtgtgtgcgtgtgtatgcgtgcacgtatgcatatgcctcggccacagccctgtgtgtgtgcgtgtgtatgcgtgcatgtatgcatgtgcctcggccacagccccgtgtctgtgtgtgtgtgtgtgtgcacgtatgcatatgcctcagccacagccgtgtgtgtgcgtgtgtgtgtgtgtgcacgtatgcatatgcctcggccacagccctgtgtgtgtgtgtgtgtgtgtgtgtgtgcatgcacgtatgcatatgcctcagccacagccctgtgtgtgcatgtgtgtgcacacctccatcacctgcagctagtgacttgtgcacctctcgcaggccaaggaagcagcaagcagccccatgtgcccctttttcagtgttcttgtttcttgtcctcatcctcaggcttgtctctttcatgtacactggagtaagcacagctgtttttcaaagtgcttgtaatgctggagtaagaactacagtgttttctgtgcccagaagtaggtttcccagtcctggattgtggttctactttctttctggagggggaggacagagtgtgactctgtcgcccaggctggagtgcagtggcgtgatctcggctcactgcaacctttgccttctgggttcaagtgaatctcctgcctcagactgccgaatagccgggattacaggcgcatgccaccacgtctggttaatttttgtatttttagtagagataggttttcactatgtaagttaggctggtctcgaactcctgacttcagatgatccacccgcctcggcctcccaaagtgctgagattacaggcgtgagccaccgcacctggcctggattgtggttctaattagataaaacactgtggtacaccttctagcagatatcatctttcagaatcgtatgagcctggggagggcatcatgccacttgttctgtggccagtgctgggctgcccattctcatgtctctctctgctctagtgtgtagcccacaatgccctggagtgtgcacgagccatctacgcctacgccctgcaggtgttccccagcaagaagagtgtgtggctgcgcgccgcgtacttcgagaagaaccatggcactcggtatgtggtgggacccgcctgcccaagggtgctaatgaaacctccagctccatttgtgtagccctgaatttaaacctctcatgtctgctcatccagtcttgtgcccatttgaggtctggccctctggttgtgatgaaggattttatggcatttgggactttgcaactggatccatctttatagccccttctgggacagcaatgataccattttctagctgagaaacaaggaaccccgggggcccgtcctgctaagtgtcctgtagcctgaggagtggcctgggtatagacttgaggctggagcccgcgtggcccatggccgagcactggctgcagcggtgggtggggcagcatctgggctcaggcaggcatattttccatttaagctgtgctggctttgggttttgactggtttttgtgctcagaggaggtccttgacaattttatttaactgcactctttaattgaaaacatctttcaggtccgctttattggctgtaaatgctgattaaatttggcgttgcagtttattgttttaaatggatagctctcaagggcattgggctcgtgtccccacgcaccctctgtccgtcctctcccaggtcctcgggtgatgctccctgtaccaggtgaggacaggccctgctggtttcactggggctacagctgagaatgttgagccattgtctctttgcttttctggtgtgatttaatctcagcctcttcagggtgtctttccatgtgtcctcctgaagacctggccccctccccatgcccaccagctggtctgtgtttgggagtgatctcctttggggacgttttgaaatggctgccatggtgcccctctgtagaaggtcacctggggcagtctgagtgaagaacagggcggtgccaggtgtaggctgaggtctctcggcccgtgacctgaatatgaactgctgcccttgacccctgggcacagtgggcagtgccctccgacttccctgccttctcccgagtgcatgcttgcagggatgaggagaggcagtagtgctgggggagctggtcctctggagagcacggttgctttgctggcccttgctccacacagtgtgattgtgtgtggtcactttgtcttgctgtcgcactcactgaggcccaaaggggtcattgatgtgactgagggtggtgggccacatgagagtccaggagcatcagacctgatgcccacggctggcagttttgctcaatagtgacctgaaatcactttcttcctataagataattcttttggatgccgggagagtgaacctgggatcataatctttatcagtgggtccggggtgcgcttgtgctctgtggttcaagatgaaaaggcctcccctgtcacagactgaggttattgctgcttccaggacacacggctgtaaaaggttctcttgtgaagttcgtctctccagctctgctatttaaacaatgcattcctttgtagaaccctcttcagtagttgattttagaacctttatggagaggaaagatttccccacactctccccattgtaaaatctggtcaatcatttatagcatcgaactttggagcagtaactgtctttctggcgtgcccacgccatggctgagtgtgatgtgtgttctggtttatggccctgcctctggtgaccgtggcctcttatcttgcagggagtccctggaagcactcctgcagagggctgtggcccactgccccaaagcagaggtgctgtggctcatgggcgccaagtccaagtggctggcaggggatgtgcctgcagcaaggagcatcctggccctggccttccaggtgggtgagggttgcctgtgtggtgaggggcctgtgcacacaggagctgacctgggtgctgactggggcctgaaaatctcccacatacaatgtggcacgtgctgttgttggggtgcactggagtccaggggctgctccacaggagcaggggccgtgaaggggcccgagagcaggaaagcagcccacctggcagatacttacctctcggtccccccactcagtgtgaccacgggtaaatgtttcagaacatggaacacggggtcacacaggctgagggcgcccttatgtgaatggatgtattcagaccgcctcactgagccaggcctgagggtgcctggttgtcatgaggggggtgtgtgttttttttaagtaccttgtctttattttcacatataacatcctaatagtttataacatactttttaataagctatagaatgctatataaaagtctgttactgtagctcaggctaatatcatagagtgtgcccttctttgagcaaataccatgagaggggactggcctgggtttaacctttcgctctcagctgcctgtttgagatggcatcactcctgtgagtaactgcagcgtcccctccacctgcccgctctctgcctgtcacgtggcttccttccacccgctctcttgggcggctgtgctgattgggacgcattcagacagccctgggcaccgggctggggaggctttgagggcagagcctgcgtgtccactgggctctgggctgtgtgagcttccgtggcttgtggacgccttctccacatgtcagtggcaccctgggagtcctctctcctgcccatgtgggctcatgaggacaggacagctggcttcccttcatcaagctcaggggaaagagcgaggttgcgtgtgatgagtctaccagtataggatgcgagtgccccattcaggggctttgagagggcgtgggtggatcctgggtaagatggccctgcacctgcccccgttattgctcgagtgctttagcagcctcttcactgtcctcactgtaccagagtgaacatgggcctgtgtgtttccaggtgagtctggattcttgcactggagtcggctctgtcatctcctccctgggaagggcttggaccagactaatcctgtagcagagcaaggcctggctcagttcctgcctgcctgcttttgattaagtgtgatcaggcgctggtccctgtgttctgacccctcttgacgctgctgtacttgcccttcaggccaaccccaacagtgaggagatctggctggcagccgtgaagctggagtccgagaatgatgagtacgagcgggcccggaggctgctggccaaggcgcggagcagtgcccccaccgcccgggtacgcagtggcaggcagggctgggccgtctggggtgcatggtgtgcacatgcgggccccacgcctggcttgggtggtgatgggagtgagatgacggcaggcaaacgagaccacagcacactcatctttgtgatgtgactaaaacattcatgtggccgggcgtggtggccgggcgcggtggctcacgcctgtaatctcagcactttgggaggccaaggcggacagatcacctgagggtgggagtttgagaccagcctgaccaacatggagaaaccccgtctctactaaaaatacaaaattagccgggcgtggtggtgcgtgcctgtaatcccagctgctcgggaggctgaggcaggagaatcgcttgaaccccgggggtggaggttgcggtgagctgagatcgcgccactgcactccagcctgggcagcaagagggaaactgtctcagcaacaacaacaacaacaaacatgttcatacggccgggtgtggtggctcacgcctgtaatcccagcactttgggaggccaaggcaggtagattgtgagatcaggagttcgacaccagcctgaccaactctgctaaaaatacaaaattagctgggtgtggtggcttgcacctgtagttccagctacttgggaggctgaggcaggagaatggtgtgaacccagcaggtggagcttgcagtgagccgagatcgtgccactgcactccagcctgggtgacagagcgagactctatctcaaaaaaaaacaaaacaaaacaaaaacatatatttatccccaccttttgtgtacacaaacaggctatgaaaagcttacaaaagtacacacagtactgcaggtaacagtgttgaggatgagtgtaccatgaagcacgtaccctggagctgatgccctgcgtgacagtgcatgtctgccccacaggtgttcatgaagtctgtgaagctggagtgggtgcaagacaacatcagggcagcccaagatctgtgcgaggaggccctgcggcactatgaggacttccccaagctgtggatgatgaaggggcagatcgaggagcagaaggagatgatggagaaggcgcgggaagcctataaccagggggtacgtctctgcctgcaccctggggctgcagctgacccggcattcacaaaactgagccccctggtgcagggtcattgcccttcgcctctgaggagatgtggagggctgggggttacagctgatggagctgcagactcaggacccaaaccctggtcccctcgctgagttctgtgcttttccttatatgaagctgcacacactgctcagaagtgcagagtgtggcacacctgcagtaaaggctggtacgtacagacctgtgtgcacaggtccacagcaccaccgcacacctgtacacccacaaatgcagagtgtgaggggtgtttttccatggacatggcagccctgagggactcggtcacccactgcagatgagaagctgggcatggctgtgtcccagttcttcatagacaccacctgagctgctctcttacttgttggttgcagttgaagaagtgtccccactccacacccctgtggcttttgctctctcggctggaggagaagattgggcagcttactcgagcacgggccattttggaaaagtctcgtctgaagaacccaaagaaccctgggctgtggtgagtcctggagggggcagcctggcctctgggcacagcttccccatcaggtgggccgccgtcacccagctgcttgtgtggagtcactcgtgcagtgcttccaggctcaggggcttggggggcggtaggtgctggccatgaaaaatcacggtccctgccttaggagagttcggcctaggtactgtgacaggcctgtagatggtttgatgcagtttaatttgtgttctgatggagggcgcctgggagagggaggggttaatgatggctgggacgagggaaggatggaccccggagagccagctccacagaggaggtggcgtggagagccctggaggtggacaggagcctgctaggtgcaggctctgttcatggaggtgctgcgtccagctcagggtgacggggctggagcactgtgcaggcactgccgcagacaggcagcttctgggtgccttgtgcggccctggctctcccagtctggtcttgtttgttctggatgccttcacctgcatctggacagcgtcaggatctgaggtcttgccttggggcggttgccagtggggctggcagggatgtgggccccagcgccttgtttctgtggtggatgagctctgctgtggagggaatggagtttttgctgctgtgactgggtggagagccctttcagacaaggcttcccagaagctaccagaatatgtgctgttggtagacggctgtgggacctccgggggcctgtctcctcaggttggagtccgtgcggctggagtaccgtgcggggctgaagaacatcgcaaatacactcatggccaaggcgctgcaggagtgccccaactccggtaagggggtgccccgactccggtaagggggtgccctgactccggtaagggggtgccttgactccggtaagggggtgcttcctggcttcccagactccgcagggctggcacttcctgagggagtgggggctcaggcttcagacggactttattaaaatgtgtagtttgtgtgaatcatttcagtcaaaagtttcagctatactcggccgttaagacaacttaatgaaattcttggcctcaaaatgggagaatttgatttcatttctgaagtgttatcatttctttttcttttaaaatttaaaagaaattggccaggtgtggtggctcatgcctgtaatctcagcactttgagagactgaggcgggaggattgcttgagtccaggagtccattgcttgagaccagcctggccaacatggtgaaaccccgtctctactaaaatacaaaaatgagctgggcatggtggcgggcgcctgtaatcccagctactcgggaggctgaggcaggagaattgcttgagcccgggagtgggaggttgcagtgagctgagattgcgccattgcactccaccctgaatgacagagtgagactctgcagggtgtccagtctgtgccctcagggctgccatggttttgggtgggccagagtgctcatcctttgtggttctccttgcacaagttctgcgagccgtgtgtgggaggcccctgtcgtggtctgaggacgtcccgggttagaatctgtaggctgggcacctttccggaaccagaggctggagtgcaaatctttgttctttgtttctgaattataggtatcctgtggtctgaggccatcttcctcgaggcaaggccccagaggaggaccaagagcgtggatgccctgaagaagtgtgagcatgacccccatgtgctcctggccgtggccaagtgagtggggcccccacaggattgctgaacctcggggtcctaatgggctctttttccagagtctgtctgcctcttcctggtcattgtaaagatgcccggcagcagggtgggcttccccgatcctcggctgccgtcgctcctgctgtggtctggggcaggcgcctctcctggcagacacacctgagggtgccgtggtcagagactcactggggacgcatgtgattcacactggtgcgctggccgccgggtcacagactcactggggacgcgtgtgattcacactggtgcgctggccgccaggtcagagactcaccggggacgcatgtgattcacactggtgctctggtcgccgggtcagagactcactggggacgcatgtgattcacactggtgcgctggccgccgggtcagagactcactggggacacatgtgattcacactggtgtgctggccgccgggtcagagactcactggggacgcgtgtgattcacactggtgcgctggccgctgggtcagagactcactggggacgtgactctggaaccttgcaggcagcagcgggtagccatggggcagagcatgcagactctaggcacatgtgggcaaagacccgccaggtgtggggcacagcagggagctcagggccatccccgacccccagggtccctgtttccttctagaaagaggatgacagtctgggaaggagctgggcctgagtgtgggtcaggaggctgggaagtgaccatgtggggtgaagggagttcttggaagaaccctgggttcctgaggctgcagctcaggacgtgggctcacctggcagaggtggcgtgtctggccccaggagctctcctgtgtccggcttcccctccacctgccccgccatgggtcatgcagagacaacagccttcctagtgctggcttttgattctctccatcccttctccccagcactgggtggcagtggtgcttggtctccagaggtctgggtgccgcccccacaggcttgcctgtaggggcacctcctctcccctgcccgcaggcccccgacagatgagagaggctccccacagggaggcttgtgtctgcctggtgctaccttggtcctgccctgtgcgttcacctcccagagtgacttctgggtgacactctgatagtgcagccataaaaccttataaaaggctttgctaaagtaaataagtcactccttgctattcccaagccagtgttttgtgtgtctgctatctgggtttgtgctctttaaatcacagtttatctaacaccgggcaattaagaataccacaaggcttaaaaaacaatcaggttatcagagtgtgaaattattccgtttggcaactgagacgaacccgaacagctgcccggagtggaggctcctcgtgttgtctcttgactacggtgcctctggctccagggggaggtgaccctgaggagagggtggcagcaacgcagagtcccgggcctgccagcatgctcagcagccagcgcccgccatcccttctccagcagcgggtgggggtgccatgcacacccttacctggcctctcatagcatggacctcttcgggcccggtttttcaggtgtgcatgtgtctggcaggcacggcggtgtgaatccagtggcctgagggctgtgggctgcaggcccaggcccttgtgctgcctggagcccatcttctcagtgttcactggggttgctgctggaggccgggtggggcaggatgatccagcaggtgtctcagtgaggagctgaaactgtataactttccctcatcaaagttgcagtttaattttgtgtcaggtttagtttcatctccttgtatctgaccctaattttacggagttggaagatctttccctgcgtgtgaattttttaagaaacagtttgggacaggtgcggtggctcatgcctataatcccagcactgggaggctgaggcaggtggatcatgaggtcaggagtttgagaccaccctgaccaacacagtgaaaccccatctctactaaaaatacaaaaattagccgggtgtggtggcgcatgcctgtaatcccagctactcaggaggctgaggcaggagaatcgcttgaacctgggaggcagagcttgcagtgagtcgagatcgcgccactgcactccagcctgggcgacagagcgagactccttctcaaaaaaaaaaaaaaaaaaacaacaaaaaaaaaccaatttggttagacccgtgaagggcagcttcaagttaatgatctggggtaattatttctggatcagccgaggccctgatcctcaggccttcttgaggggagcaccagggctgcgggtcagggatgaagctgatggccctgaagccgttcccctgccccagaataccgtcctgcagccactcactctgggttcacgtccttctgctggaacaggctgttttggagtcagcggaagatcaccaaggccagggagtggttccaccgcactgtgaagattgactcggacctgggggatgcctgggccttcttctacaagtttgagctgcagcatggcactgaggtgaggcccctcgacagaccgccgctcagtgccttctgggactgtggcggggagttccgccagccctgggggctctaggaggtggccacggccagcgtgactctgcccggggtcgggaggatggaccgggtgtgtggggcacagaatcctcgacacctccccacaaggcagtctctgcctccacatccgttttctggttatagcctcacagctccacaccctggaattgaggcaccctgtccgttagggtggcctgtctgctggagtattttaacgagttatttgctggctggagcctgggctcactttaggaatgggaatggagttggcctttttcttgggcctgagcctgagtgtggctttctaggacagcctgggcagcagcccctctgctcccacccgccccgctagagccaagcgttgtctgagctgtgctggaggcagtcaggctgtcctggtcctccctggaaagtgttgccagcccacgtgaaccctaactccttgtttggagaaggcagacgtgagcacttgtgtgaggcacagacatggggagcctggctcagttcctcatctgtgggctgaggctggtggggtccatgctcctcaggaggtggggctcctttgaggaacacacctgaaagagccttgccttccggtgcagggcctgtgccctctggcccgccagttggggttggtgctgccagggccaggtctgcaggggccaggcgagaagcaggcgaggtccggggagtagcgtgggaggacccctgcctgacgtgccctgtggtccccccaggagcagcaggaggaggtgaggaagcgctgtgagagtgcagagcctcggcatggggagctgtggtgcgccgtgtccaaggacatcgccaactggcagaagaagatcggggacatccttaggctggtggccggccgcatcaagaacaccttctgattgagcggttgccatggccggtctccgtggggcagggttgggccgcatgtggaagggctctgagctgtgtcctccttcattaaaagtttttatgtctcgtgtcagaacaggcagcctgctggttttctctggggcccttctctggctcctgcttctgctgccccagtctggcctgtcctggcctgtcccatgccgtcctggggtggctgtgatcgcccttgcttggacagaagcctcttgcagacagccggtgtctcacagaggaggcactgtggaggtgcccgggttccccaagactgtggagaaggtggtaggggtgcagatgttctggccaaaagccctgtgaggacagctggagacagtggggaccaagctgcatgcaggacgcaggtgctcgcaggagcctggcagccgcctgcaagggtcttggtcaggggacagctggggcctccctggggtctgagtgcaaacaggagaacccagctctgcgcagggcctctccacacagcctcccgggcccctcaggcatgtgctgagtgacagtgtcaccagtaagaggcgttctttcttttggaggtgagttcatttttttatttttgagacagtctcgctctgtcgcccaggctggagtgcagtggcacgatctcggctcactgcaacctctgcctcctgggttcaagcaattctcctgtctcagcctcccgagtagctgggactacaggcgcccgctgccaaactcctgacctcaggtgatccatctgcctcagcttcccaaagtgctgggattacaggcgtgagccaccgcacccggccgtgagtttatctttgctaatttatcattcgcagtttaaccctaaagcccttgtaatggttctcatctccaggttgaacagtgatggttctcatctctaggttgaacgttgatcacccgagagacttggcttctcttcagccttagctgtgtaaggataaaggacgtcctcaggcctgggatcatgtgtgtgcattcagttgggagccagctggttcttgtgtaggccggggctagagacatctggctggaggtcatggctggcccagagggtgtgggtggacagtcgttgaggccagcgggcggggaggagggcgctgtcatgtgggctgaggaggctgctggagagcagctgtccctggatgttccttgtgagaggggagccctggagggtcccggcctgtcttgtggtaccgatggcagggcctgtggtggtggtcagtcactgacccacagctctgcccacctgcacatgggggcctgtgctaggccttgtggtctgcctgccctgctcctgacgagtgagaatggctggggtgggagatccctgcctgcacgtggggcggtcctggtagaccagaatgtgggtgtgggtcccccttccctgtggttctggggaccttgaggacatggtcaatcccgggcaagggacctgccacccctgtatggggtcaggaactgctggttggtctctgctgggcaggcaacctggggtccagctcaaatcgttggaatgtggaagtccttcctctcgccccgtcctgaggagcagctgcaggagcttcatgagtgttttcactggaacttgtggaggagtttcctttgatccctcatggagagacggaagcatgagggagccctcaacatttattctgaagatgaagagagtcctgcagctttttggagtttgtgaagtcagcccggccctgtacagatgtggaaaccgaggcccaggaagtttgtgagccagcccggccctgtacaggtgtggaaaccgaggcccaggaagtttgtgagccagcccggccctgtacagatgtggaaaccgaggcccaggaagtttgtgagccagcctggccctgtacagatgtggaaaccgaggcgtaggaaggaagcccttctctgacctcagagctgaaatggccagtgctgggtgggcattgaggggtcacacagaaaagaatgtttcaggccatgttcaggggatacttcctgcagggcccttggaaagttccggagcgcttacattgtccatgtgtgagtgtctcctctttcttgcctgtgtggggttttctcaaatgctttgagttggccaaaccacagttgtgcgccacttaacagtgcggatacattctgagaaaaacctcgttaggtgatgtcgtcttgcaaacattaaagagtgcatttacacaaggctggcaggcacggcctcctgcacccccaggctgtgtgcccgggtgccagagcctggggctcctgggctgcagacctgcacagcctgtcacagcatttaatcacatccaaacacggaaaaggcaaaaacgtaaagatgcagtgttacaatcctaggggactcctgtcacctgtgtggtctgttcttgactattgtgagtcactgacttttccccctgggaaactaccttaacttgtcttcaactgaaattttttcagcctgcaaagatgagttgtgcctcagaggttgctcgtgttctgaggtgcctcttcaccactgcctgtcaggctgctaaccagagtgccccagaccacagcagaagcgacagcagccaaggatcgggggagcccaccctgctcctgggtatctttacggcaggcagcagagtaacagcctcagacttacctcttcagccagagacccctcagcccaggaggagtgaggccgggccagcagcgggggcccgggaagccccatgtcttgggacctgctggggcagggccccctggatgtcaggctgcaggtccggcagctggggaggggatgagggcctcccaccagctctgcccatcagccagatccctgggagaggcagcacttgctggccacagagtcggccccagtctcacctggctcccctcccccaccagctgggccctgcactgccccagcccacgcggcgcctcacccctccttgacagaacagtatctctgggacggacaagttaatccaagacccacagtagccctggatcccctgggagaggtggctgcccagctccagggccaggttaattgaagtgatagggagtggagagagggagggggcagggctgggattgcgtggcctttccttccctctcctgctccctccctcagcttggaggagccaacttcaaaagcctccgcctggcctgcccctctgcagtcctccaggcagcctgtccagggaagcggttggctggtgttggacctggtgcggcagtgcacaccctgcccaaggaccccaggatcatgtgcgtggcctgctggcgggagtgagggagggcaagaccctgaaaggcccatggtgagcagctgtgggcctcctctagggagggggcttacttgggtggaggggctgggggtacacacagctcaggagacactgcttgttcccctgagccccaccaggaaatctccggttggctctggtcactgcgtccctgtgggtggcactgggtgcatgtgccctggcttctggcagttgggggaggggggctcctgggtgccgggcaaccctgttctaagctgggctgaggcttgagcctggaagtggtactaacaggccagttgggactcccagggcagccagtctgccccacctgggtgggacacagcaggtgctggacatccttgcagctccagctggcctgctcaggagtcaggctctggttctcgctatgacctctgacccagagcaggcagagggaatgacgtggcaattctgagcccaccaagttggctgtggcgtgtgtggttgggggggtcaggtttcaggaaggggccacagcaagccatctgctcttccagccattgctgctttgtgctctgagcaggagctgccaccgcccaccaggcccccagctctatgcaagggttggggtgctgcttgttcaggctcccctgacagggctaggaagccgagtcgagtcctcttatcttggttgggttcgcatgattaatttccagccctagatctgctgtctgactccatcctgggggcccaggggaagggttggggctggccccttttgggtggctgggaacctgggggccgtcagctgtctccttgatgtttgggctttatccctgcgggcgcaggccctccattttgggtcgggggaggcctgtggcacaggctgcccggagggatggcgtggggcggctggtacaggcagaggggccttttgcgactgttggttggggctggatgtggtggctccttcctcctctatagcttctgggtgtccccctagctttccccttccaatagggtgtggcttggagctctgagcccctgccccagttgggttgggggtacaaggagtccccagttcccacgtctctgtgagctaacccagagggcgccagtatgggaggtgtggagttgaatgggcatggccatgagtgagacaggctgtactgggacaacttcctactgtacccccaagagcctgcagaccagccccactagagctgtacggggctggtggggggccctgctctgtgcggtcctgagggtgctccaccccttgctggccccactcccacgtggaccacagagccaggctctcctgactctgggcctgccccctctatctcctgatgggttcttcaggactcagtgacatcgcctcccagccgacatcactcacccctttcacatctttgcagggagcatagaactgtctggtttgcagacctatctcttgtgtctcctgatttatcccgccaggcctgtgcctacagcctttcttgattggtgacacgtccatttcattcgctcagagatcccgtggggtggggcagggggtggggcttctacggaaacaaagtgcaggtgggctggctgctccctgtgctgggaacaccccccaggcctaaccccaacctgctgtctcctccaggtaccccctaagcctgcactctgggcgctcctgctggcgctgctggggaccgcgccaagccgcgcctattccccggcctgcagcgtccccgacgtgctccgccactatcgcgccatcatcttcgaggatctgcaggccgccgtgaagtggggcggggcgggggccgaaaagaccaggccaggctccagacactttcatttcatacagaaaaacctgactagacccgggagctcgggacggcggggacggcctcgggcctcctgtggcgcccagaaggtatggaggaggcgcccctacccaagctcgccggcctgctcctctctcagtttccccccacccccaccccgccttcctcccttccctccccaggagcacagtatcctcctgtccatctcgtccctgggtcggaccctgcgcggggcggtggccgggggccgccgcggggccctggagagagctgcttggaccgtggctgtgcgcaccgaggcggtgatgcggcgccactgcaggacgctgcgccaggtgtgcgtccctgagtgcacccagagccagacctcccttaacccccacagggccgccgcgcgtcccggggctccacggccctaggctgaagtcgggctgggtcgcgtctcccttcccgggccgggccgggcgcgggggccgtgcgcattcgctgaccgccctgtccccgacagcggagccggcggcccaagatgcgccctgcccggcgtcgcggcggccgaaggcagctcctgctgcgcgccctggacgccgtcgccacctgctgggagaagctcttcgcgctgcgcgccccggcctccagggactcctagcgcggcccgtcctggccctgcgcggggaggagaaccagcggggccgcggcagagcctggagacgcgcctcgttctgtagacttgttggtgacctcggcccctcgctcgacgcagcccgcgctccccggagggcccaggacttggagaagggagcgcgcctggccgccgctgggtcacggaggaggcccgccctccacgcgccgaaggcctcaataaacggagctggcgctgcgggtccggcactcccttcgcctgcctctctgtgggcctaggaccgccccgggatctgcgcctcggtggcggggggcggtggagggggaatgcggagacccgcacttcctgtggcacctggacggggcggagccgccgctcccagcctcgggcagcagagggcggacgcgggacgctgggcgcgctccggctctgtcagcggctcccggctgggcggagggcagagcgggggactcctggggcccctaaaacgtcacgtatccgtcctgctccactttggaccggggccgggggtggaaattgaggggaggggaaggctggacttggtgaattcggagcaaaacaaccggataaaggaaacgggcccgaagggaagcgggagctgcgggccttggctgtgagcttggccaggctatttcctgctgcctccggaggggtgaccacggcctgggctcagagactgcccagccccctctgcaggactggccaggctggggcccgctttctggcccctggaaccctccatttgctgggggactgtcccctggttcccccatctgatgcgcaggtctgggagtctgtcacccccctcccccaatctcggcccatggaggagcaggggaggtaaagtacctgacacctgttaccctccccttcccggaaaggccgcgagcaggctgtgcctctggcattctgtgggatcaggggcagcagcagaagaaagaagtaacctcccaagctgaccctgacccagccccacactctgtgttaatgtatttagtctgtgcaacgggagctactgtctctgttttatagatggggaaactgaagcacgaggaggctgagacttgccccaaatcacagccagcaatgtaagagctggcctcagacccaggcccagggcatgggatctgccacatgtcccctgcctggaggctgggggccaagcttcctggacttcagagccttggattcccctgcagagttagcacttctgacagagtccctggccatgctctgagcacaaacacctagcaagcattcccagccctagttctgcattgcctgctccgtgggggccagtgggggcaagtgtgggagggatgagggggagatgcagggtgcaggagccccagctggagccaaagcacttgaggggggtgcttggacttatcccgaggcagcggaaggtctttggtgaaagagggatgttagagttggaatctagaaaggttcccgtgacttgtgtggagggttggtgaggacaaaggggtggagagaggtccaggctgcccagggtcctggctggagtacctgggtgggtctgtggggagcctgaacatgggaagcactaaagggggagtgggtcggtttgagggccctgagggagctggggaactgtggacgtggctgggctcagctgggcgtgctggtgtatggagcataaggtatggacagccgagcatggctgggaggcagctgagttggggcctggagagagtccagggttctgggctgggctcagggacaggatggggacaggccctccatgaaggctcccactgtcacattgccccaggggcagctgacttttgcacttggacctgccccaacccctgggccatggggagggcactcctctcctgtccatgcatgacctcctgggcggccccttggctcctgcccacccgcaatgctcccgttctgctgttgagagcagtcagaggctggggatgtgggtgggcaacagaaacagctccctctaccctgactgagaaaggttcaaacaaaccacagcctcttgggggcaggaggaggaacagaggcctcaggattttggggacacatgtcggtgcctagtcctggaccacgaccacgtgggtgggtgagaagtcctgcatcctggcccatggctcctctccctcatgcagaatgggagcaaggtgggctttgggcttctgggacaaagttcacttgtccagggtggggacagcccaaccagactaggtctaggggcatgtgtggagctacacgaagcggcccagagctaccgagagccacagagactaggagagaagccgcaggtgcctgctcagacctgagaggctcaggtcctctttgggctcagcactgggaccgtagctcttctgtagctccatgaggatagaggcatgtctccctcagcatgatacaccagcacctggcccaggccagcacacgagctgctcaacaaatgtttgttagctggaactgaccagaaccaacccagagatggaaagagactcactgggcccacggctgatagggacagagccattggccacggaaccactgagggcagatcccatggactggccctgtatgtctctagaccgactggtggtgccttccctgcagaggcccagggcaggtggcctgagcctggttcttcgtaaaatactgtttctgggttggggctgcacacagtactgtcccgtcccaccctcatgccttttcagggcttggctgctccagggaggtgggggctgtgccagggtaacagatggagcctgcagggcgctggctggggttgtgcaacttcccacagcccaggagccaggcccctccatgtgccgcactgggaggagggggccgggcaggctttgaaggggacctgggtcccgaggcctccccagactgggagtctttgaaagaacatctggaactcgggcaactggctgactagtgtctggatttgcaaaaccaaaagttaatcccgactttgcctcctgtgtgttccccacccctgcccccaagctcctctctctccccagcccacctccaccccttcagcggtggggcgcgcagcctctcagggtctcccaaagcaccttcccccaccaccgccaccggcccccaccccagcctgggagttttgccgaagctgaccagagggaggtggtggggaagatggatgttttctgagtgcctgccatacccaggccctgtgagcggacgggacagaccgtcacaccgcggctggagatggctggggggcagtgtgagtggtcctcagaggaaacagctgcgcccagacctgggaggtgcccggccttgcgtgggctctgagccctgcaggtgtgcagggaggcccccctgctccagctgtggctgactcggaaccaagtccccccaactccaggaaacacatactcactggtggggggatgtcaggtgctggggcccattgtctctgccagtgccttcaggaccctagggggggcccagcgacagcccccatcctgccccctccccaggaaaagacgcagctccgtaaacacagaaacaaccatcgctccctccccgctcttcccctccccattaaaatccggaagagccagcgggaggtcgcacctgctgggggaagtgagtccttgttttgggggaaatgaggaggtcaggcctctgggcgcagggcagagccgcgtgcgctggggaggtgggcagccctggggctggacgcgggttcccgggtcgccttccggcctcgctcccgtcgggaggtcccgacacgggcttcctcgcagcctccccgcctggcccggcccgattttggccgctgcggtcaggggaagaggcggccggggctccccaccaggtgagcaggtcctgcccggcttgaggccaggggtccgggctgcggcccgagataagcgtcgcgcccgccgccgcttcctgcgcttccagcgccgccacttcctgttttctcgcgctggcgggcggggtcgtgggagacgggacgggggtcgtgggggacggggcggggtcgtgggggacgggacgggggtcgtgggggacggggcgggggtcgtgggggacgggacgggggtcgtgggggacggggcgggggtcgtgggggacggggcgggggtcgtgggggacgggacgggggtcgtgggggacggggcggggtcgtgggggacgggacgggggtcgtgggagacgggacgggggtcgtgggggacggggcggggtcgtgggggacgggacgggggttgtgggagagggagcagggtcggggaggatggggtggggtcccggggaacaggagttgcggggagcgggagcgggccagagcagtctcagcaagaatgaacctggccgggcgcggtggctcacgcctgtgatcccagcactttgggaggccgaggctggtggatcacttgagatcaggagttcgagaccagcctggccaacatggtgaaaccccgtctctacttaatacaaaaattagctagacgtggtagcgggcgcctgtagtcctagctcctcgggaggctgaggcaggagaatcgcttgaacccgggaggcggaggttgcagtgagccgggattgcaccactgcactccagcttgggcgacagagcgagactctgtctcaaaaaaaaaaaaaaaaaaaaaaaaaagaacgtaggtgagaccctgcgccttctgcacgcctggagctggctcctggggctccccacctggcctgggacagaagtggtgggtgggctggatggagggttgagccagtccctgtagggccttagttttgagggggcctgtttgggattggaggtttgcagctctggacccccctttccagggcagctgttctagcatgggttccaggtacttaacatattgttcagactttgttattagagatacgcatttttgtaattttaataaaaacacatctacacaaaacattgtacacaaatgttcatagcaacattattcattattcattatcattatcaataacactatcattattcatgatagccgaaaagtaaaaaccatcagtgtccatcagtcgctgaataaataaaatgtgatatattcatacaaggaggggatgttactcagccacaaaaggaatggaacgctgacaggccaccgcatgggcgaaccttgaaagtgtgcagggtgaaccaagccagacacgaaaggccacatatagtatattatcccacttacaagaaatatccaggccagacactgcaaatccacagagaccaaaagcagtttagtgtttatcaggggcagggggcaggaaagaatagggagtaatgggtttctcttgagggtaatgaaaagctctaaaattaaagatgggtgtgggggcgcacgcctgcagttccagcgagacagggagggtcacttttcgaggctgcaggcgctgagatcgtttctgtgaatagcccctgcactccggcagcctaggcaacatagcaagacccctctctaaataaataaataaataaataaataaaggccaggtgtggtagctcatgtctataactccagcactttgggaggccaggtgttcaagaccagcctgagaatcataggagtctctacagcaaaccaacaaggagcatagctccgaggtagagcatttgactgcaacagacagaatgctctaaaataagacagtggagatggtttccagccttgtgactacaacaaaaccactccattgtatccttaaattttatgtaggttttgtagaacgtaagtggagcggttgggttttctggggtgcttttcctgctgagaggtgggggcggagtggtggggggctaaggtcttcacatgtgccctccttgcctgccccagcaggaccttgctggggtgaaatgtgctcttcgtctggtgtgtggctgggtgtgtatgtgtgtctgtgctggtgctgggagaggggtgcaccatagccgctctcagcccccattttctctgactctgcccctgggctgcctgctggggagagttcaacacctcgctcagttcactctagggacaagctgggtcctgggcatgggggacgggaggggagctgtggccagtgccaggcagggctgctagaacttctcaccaggatctaaggcctgactcagcaggaggagggtggagacttcccttggagcctcagggaagaaggcagacagggccaggagcgggaggggtgtgcagctggtgccagggatggagcacccaggccctggggctgttcagcctttggcgggtagaggggagatagatccctgggctgggccctgggagaggccctgtaaggagaccccacccaccgctgccgaggagccgctattggaacccggtgccctcagtggaagcctctttcatgtccccttctgatccttctcctgggcatttccagcctctgggctgggacttgcttcagctcgggcccctcactagccccccaccctggcacttgggggagggacttctcacaggtacccactctgtcccctcctcacacagaccatgaggctgtgttgccacccaaggtatcttccaagctctccaccccattggcctagagggggttgcagtgggggtgaggagtccagaataggggatgtgtgctggccatgggactgccactgtggcctccccaggctgtctgtgtctgtgggagttgccggggaaggcgtggctggggagatgcccagcccaaacagggaggcactggaggccgggggcaggggctgtccacatgaatttaggcagcaggacaggctgggtctgttgtctctcctgccttggttgggggttgggggaggggcaggtggtctcatgcctgggccagccacttgcggattctggctgctgggtcgccctctggctgaggtccccatggaagggggtgcatcttgggcttgctgaccccagggctccagggggtgggccagagcaggagttggtgggcacgagagctgggtgtggcttgcattctcacaggtgtgagcatttatctcatggtatgatcccaggaagagtccatgttggtgcctcagagacccccctccccccgcctccaccgaaagacagatgtggcttgtgtccctttgggtctcaccgtctctgcctccctgctgtgtgctggcagactgcttggaagacatgggcgatgacctcggtgtcctgtgggctgtgtctgcctgcctggtgcatctctgtctacctctgagcctgtctcctgccctcttcagcgtgtctgtgtctgtcccctctgcgtgtctctgttcctttgtctttgagttctgtgtgctctgctgccaatggggtggggaaggggccccaggtgcagcccctactgggggcccatctgaggggtggcactcatgctgattaacacagaggtgacatgccctgcttgaggggagggtacctgtaaaatagccccatcccaccccctccacacacacactcaggtagcaggcacatgtccatcccgccccaggcttgctgcacatccatatgccacacacacactgtcacctgcatgaagggccacactgggagtctcattcacacgcatgcagaaccacagacacactctcagaggcgtgtgctcccccgtacctgggaggctgagccgcgagtgagtttccacaccagggcagtaaaggttcagctctccccaccgactccccacctatgcagagggggtgctggggcaggatatgcccttcccccaggagggaggtgcatgcccctcctcttggcttatacctgccaggccctagggagtgtgtctgtgtctgggtgttcacttttgggggtgattactccaaacttccctgaacacgtgggtttgaggtcgagaggaccaagaggtcagcatggaaagacggtgtccaggccgggcgctgggctcacacctgtaatcccagcactttgggaggccgaggcgggcggatcacgaggtcaggagatcgagaccatcctggctaacacggtgaaaccccgtctctactaaaaatacaaattagccacgtgtggtggtgggcgcctgtagtcctagctactcaggaggctgagcagaatggtgtgaacccagcaggtggagcttgctgtgaaccgagattgctccactgcactccagcctgggtgacacagcgagactccgtctcaaaaaaaaaaaagagagagaaagaaaaagaaagagggtgtccagtcctcctgggggctagtgagatacgactccagagttggggggtcttgggatgtgaagcctgtgctctcctgccttggccatcggacctgtctctgggcagagctggacaggtcacccgggtggggggagcgctgtgggtgtagcatggtgctgtcctccctggggtgagttagaacagctgacggagaccctggagtctgtgtctgcatgtgggctgccaacctgccagcctccctcaggaaagggggccgtactgggcagtccttgggcatggaagttttaaggtggaggcaagggcgatgaaaccctagcgggggtgtgacaggattgctggtatagtctgacctccgataggcttgagttaacctgggggtgggacaggaggggagtggagggctgggggggagtgtggacccatgcctgctacccacgctctctgggatgtgtcacggaaggatgaaggagtgctatgaggttcaagctaggagtcaggctccctgggggcgattcggagggaaggggcgtccagggctatttggggaactgcttttccctccctgcaaacaccacagatgtcagtgtgcagaggaaaggcccgaggatttattgtggcctctccgtccggggacccagctccaggctcctcctttatagaaagcaaacatctgtattcctcacattgcaaaagtctttgccacagtgacgcttctgatcactgaaacttcttggaagaaaagtttaagagtttaattaaaaattaaatatattgtattaggtatattttttaaaagggcaaagtaaaaaatattaatacaatctggttgtagaaaatacactgcaagaaaaggagcaggtgcttcaaaaatgtaaccctggcaactctgccaacaggtcctgggctcgggcttcctggaaaagccccgggacacgtgggaactccaggcaccctcgcaggggccccccgagggcaggtggcccagaagcccaggaagggtggcctgggaggtggaacgggcgcaaggccgagcatcactggctcctagggggctgtgacatggaaccaaacatacacgcgtatgagagagcagagcggcagcgacgcggtcggatcggtcgcgggggctgcgggaggaagcgctgcagggacccgggcggcgccggcggcctagccggagatgcacgcgctgtaatagaccgcgctgctggcgtccgacagcgcggagatcaggctgctctcctctgggcaggacatggcgcgcgggcccagtttggccagtgccacgtggtacgggagcccgggggcgtcgggccgagtccggctgcagttgaggtactggtcgaactcggtgaggtccacgtcggcccacagatcggcggcgggccccagcggctcggcgctctccagcggcggggcctcgggcggcggcgacagcgggccggggtacgggccgggcgtgcccagggtgccgtagtacaggccagcgagcggcgccgcggggggcgcggtcctgagcgcctccgccaggggagccccgtagcaaccgccggggtcccgcgacaactcggtgggcgcgtagggcgcgcggaagggccgcagcgcgcagtcctcgggcgccgcgggcggtgggaagaaggcagcctcgccgggctccaggccgtccagaggcgagcgctcgggcgtgggcagccccaggccgtcgaactcggcgcccagcgggggcagctcgcggaaggcgcgagccgagccagacgccgcggggaaaggctcgggcggtggctgcgggggcgctaatcccgggagcaggaggccgggctccagccgccgggccttgcgcgcctgcttcttgcggcgcggccggtacttgtagttggggtggtcgcgcaagtgctgcacgcgcagccgttcggcttcctccacgaagggccgcttctccgccgcgttcagctccttccacgctttgcctgcgggccgtgggcgccagtgagtggaacgccgtcgggcgggtgggcgccgagccctccgtgcgcccgggacgccccgcgagggtttggcgcagcccccgcaccccgcggcccgggacccctgccccccccgccccaccccggcccgagccccccccgccctctcccccttctctgccgccctcccgccgctcacccagcatcttgctgagcaccgcgttgtgcaggtccgggttctgctgagccagccgcttgcgctcgtcctttgcccacaccatgaaggcgttcatgggccgccggatgcgcgactcgtctgccgcctggcgttccccgcggccggccgggctgaggccatagcgccccggctcggggctgcgcgggggactgcgctgcgggctgggcggcgaggcgggcgcggcgggcgcggcgagggcggcggggccggcggcgaggccgcgcgtgtcagcggcggccccgtgtcccggggcccatgcacagtcgcggcgggcgggcgggtcgtcctgtgcgccgtagccgggcggcgatctctgcattccagctgggcgcggcctgggcggaacggagcgcgggagcgcggcgggcgggcggcgggcactggggagccgggcgcaagggcaggccaggccgggagggcggatggcggtggggacggcggtggcctcgggccgggcgggcgcccagatatagcggctcagggccaatcggcggcggggcgggcgggcgggggcgggtcggggccgcctcctccccgggggctccctttcttctcaggccgggcgggattccgctgaggcctcccccgcgcacagcccccccacctcccccgcgacctctcagaaggagagaccccccgggtgggaaagaaagggctgctgatgagggccggtgctgccagactttcggaggcgagctgccacccacccacggagtcggacccccgggcagtaactgggggagggcggcagtgtcccgctggttgccgttccccgccccccgctgggaggctccatggggaggagagggccctttttcacaccaagttctggggaggctgccttcccaacagccggtaagtccttcctggagtgcagcgccttcagaaaaggccccgtctttggggaggcgctctgagtccccaggggcgcccatgctggaaactctacacccatgtgtaaccgtcagcaccagggactttgagtgcctttatgggacaagatggtcttctgtcctcactcccaaaccaactctggcacaaggcaaagctgacacagggagggagagagcagaggccctggacggagcccacaaagagaagggggagcagggacgcagaggctgtggcgtcctccctgccccccaagggcccttggggaaggggctgggaccctcagtggcttgctggctcccctgcccagcccaggccaccgctgcagcaagaggcagggcctacctgggtccttcccactggcccctccctggaccctctgacctgggcgggggcgggttccggaggagcgtccagcttcctgaattttcactgtccccttcctactccatcaggaggggatctgggctccagagctgagggtctccctctggaggtcctcccctcccactgccacgcatggttctactggagaagggttgggtgtccccagcagccctccaggcagggtcagaatctcgccacctcgcggcacatctcctcatagcctggaggctccccagctccccccgccacactatgccgggagccccatgggtagaggccacaggtcttgtgaccctgagcctgtgtggccagaagctcttggttctctgtccctgccagcctcgctaggccacatccagcctgtgttatgaatggggtgggccccacgtgggccttgcagtgccccttagaggctgttcctgaactgtccccaggggcactcctgccctgaggccagcacccccacaggggcactcccaccgagggctgtcgcggtcggtgtccagccctccccaaagccccacatcacagtctgtctcgacgcccatcgtcccagcatacggggctgggtctcccagtctggtctccagatctcccgtccctccagtttgccccacgggcctagcacctcgttcacagacactgagccagtgctggctaatggggggcccgtggggcaccaggaggtgcggcccctggcttttctggggaggcaggcagggttgtggccacagggatggaggggctcacaggcctctgccggatgctgctagtcctcctttaatctcagtatgggtggctggacccttggccgagtctcagtgtgggtgggcctcctgggcagctggcaggagggtgcagggggggtggggagccgtgcgaagaccccaaagggctaccacttggcggaagctctctctactcacaaccttagggttgcagtcaggggtcaccagggcctggctcagcctgggcagtggctggtcactgcggcctgggaaagaggtcctcggggtcctctgcagtagccctcacacgtggggaaggatttgcagttccctgggggccctgcttggtcctctgccacccccgagagcccagagtcactggagctgctctaaacatagtggcaggcagtgtccggcatgacctcatcgcctccacgtcccccacaacacccaccagcagccgccttgcctggcgccagccagtgacccaccctcttggctgggctgtggactcaggtgtccggctgtcatgtcctgtgagtcggggctgggcggggagcctcctgaggtgctcctctccctctgcgtggcagggaggaggctggcagccctggcccagtgtccagatgggacaaagtgggggtagggaccacagccagggtggcgtgatctggagccgcagggctggggggacttgccagggctgtagaggggatggtgtgggtgtggccagctgtgctgagggaggggcatccgatgtgtgtctgtgcatctgtgtgtggcctgtgtctgtctgtctgcctgggtgtggggtgagggggactctagtgctggaggctgcccagggccttgagagccaggcaagctggacgttcccaggaagagatgaggacccataataggtccaggaccaggggtcctgctccgtgaagtttggagggtccccaaggcttctctggccactgagcttgggccccagcattctccaaaagagggcaggcagttcatgagtctaggggcattcctctgcctctggaaccccacctcagtctgtcctggactaggtgggctatggcccacccttgggaaggagcctatctgtagcccccaagccccagtcagaaaggcagagtttgggggcaagctttctctacaagggtggggctggcctgggcactgagtggacactgtcctcctgcctgccacctgcccctctccctcagcttggacaggaaccccggcctctgagtgaggtccgcaaaggatgctgggtagtccccctccgtggctctgggtgggagcttggcttggcgcggctctgggccgggatggcaggacctcccagccactgcctgggcacagacctcccaggatcccaccagcccagcccctgcggctgcaagagcagcgaggctgggaccaattaccgagtcccgcagggcctggaccctcctgctcctcaagggtgaaggtgggggttcctgttggatgcagtttcaggtggagggggctctctggcctcccgaacctcggctctctccagttcagatcctaccttctgcccacagctgaacacctcttcctacagggagcccccgacctcccagccactgtcctccagaggccatagcatcttggtctccttctgtctgctgcctcggtaggcttcctttgggacccgtggaggcatgtctgactcctcaggagctctgtatttagtgggccttgtcctggggtggcggctccaggcctagtgagacatggcagaggccagggcagggagaatgtgaagctggggcgagggtctgtgacgaggccgcctgacgcctcagcaccaggtggacacagttgtgtgcatgtccctcttggccaatgacaggtccggttcaggtggcccttgcccagggacagaggcttctcctggctccgtgccttccagctctcagtcctggtgtgcacagcgtcaccgggcttccgatagctgccggcctcaactctgggagagggcaggtggggcggcaggaggtgcctgtgctttcctaggcatgagcaggcatgagaggtgcacatgctcctgctcacctgggcggcgcctctcaactgttaggtgtggggttagggttcacctgacgatttgccgcagtccagcggacccgagagttgcatgcagagctggggttgcggtgcgagtggggaagggtctgaaggtgtgggtgcagggggctgtgctggggcctgcaggctggggtgtgcggtgtgagtggggtgcttttgtagtctaaggggtgatgtgccagtcgtcgtgtggtgtcaggtgtcagtcgtcgtgtggtgtcagggtctcttctactcggtgctaagggccagcaggaccgagaggggtaggggcttctctgggtcgagggccacagggggctggtgggggtgggagtgctgaatgcacagggtgatgctgggcttcgggtagcagatgtgctgtggacagtcggggtcgggtcatctgcggcgagcggggcttctgtaggtgctcccagggccctggtgatgtggaagctgttctcaaattctggggtgttgtgctgtggtgggcatgtacctagggtgttatcaagggctgtgcccacttttaggggcactgggcaagagtcggggtgtcagagcagctgcttgagctccgtgggggccattgtgtggcccttggggtgtcctgccctgggggcggctgcagggccgcttgtgtccctgggtgttgctgcctgctgtgcggccttcccagtgatgtttgtgtgtgtgtgtgtgttgggggggttccatgggaagcaggctggggggctgggctgctccgggtttctgaggcaacagcagggaggggccaggaaactgcagctcaggaaggaaggccggccttgcaggagggggcctggggccagcttgggctgagcaggcgccagacattctgtgctgcggccccggcccccactggctgggagctcctgcccaagttccgctggccccacccttgtctccacctccatgcttgtatggctgcctttattcagaccgtggtgacttgggcttgggtctgtgggtgacctggtcctgtgcttatgtgagccccagtccatttgtggctctgtagaggcccagatggggctctcagtgtaccctgcaccgtggggcatgtgttagcacactccggtccccagggtccctggagggcagtgtccactctgactaccctgtcctgggctggcccagcctccttctcccctgccaggctggtaagtcgggagagggagaacatcctcaggggtcatctgtctcccagccacggaggggcactgcagggccggatgcctgaagctgtgtgtttctttttgttgcttgtcctggcattggtgacagccagctggggctgccacataggctggagggggcaggcctgtgttctgggggctcatccaccccttcttgctcagggacaggcaacatctatccatccatttgttattgagcacctgttgtgtagtagaccctgttttaggggttaggaatttggcagagaacaaaacagacaggtccctgcctgtgggaagcttccattatggtgagaagagacagacaatcaacaaatccacaaacaggtgtggtgactcatgcctgtaatcccagcactttgggaggctaaggtgggcggatcacctgaggtcaggagttcgagaccagcttggccaatatagtgaaacccctgcctctacttaaaaaaaaaaaaaaaaaatacaaaaattagccaggcgtggtggcgcatgtctgtaatcctagctaccctggaggctgaggcatgagaatcgcttgaacccaggaggcagaggttgcagtgagccaagatcgcaccactgcactccagcctgggtgacagagtgagactctgtttccagacaaaagcaaaaacaaaaaacaaaaattagctgggcgtggtggcacatgcttgtaatcccaggtagtagggaggctaaggcacacgaattgcttgagcccgggaggtggaggttgcagtgagccgagatcgcaccactgcactccagcctgggcgacagaggaagactgtttcaaaaaacaaaaacgaaacaaaacaaacctaaccaaaaacaaatccacaaacaagccagaacttggggtgccaggtgtagggaggggggctgtgtcagggccacacatggcttttgcccttgggggttcatcaggtatagggaggggctgtgtcagggccacacgtggcttttgcccttgggggttcatgggaggagtcttttcacagagggaggagcatgtgccaaggccctggggcagggaagtctgctggtgtgagcagagcagggggtgcagagaggaggggatgaggctcagagggaacaaggggctgagttggctctgggagggtcttgcattttctgagtgaggtgggaccttgggaggttctgagtggagtgtgatctgcctcagctcagctgctacgtgaagacggggctgtgcggggcaggagggacgggcagtcccctgccagaaggcagggggctctgcttctgccgcggcgggagcctggccaaggtttgctctcagaccccatctggctgccccaggagtctccctggtctctctctgggaggcctgggcccctgggaggtgccgcctcagggaaccctggttttgctgccctgtgagtcaggtctctaggcttcacccatagccccgaccccacggctgcctggggcctctggggaaggggagggtggagtggccgccaggctggcgggctggcagggctgcatttctgggaattgtgtgggggaagtgcattgttagagcaagcctggagcaggccgccagggccgccactggcctctggggatgcctcttgcctcccccagcgttgcttctgtgggagggagctgggactgggccaaggctatgggctgggctggggactttccgagagacgctgccctgggcaggtggctcttcccattctacagactgggcgactgaggtccagagagccgggtgctgcagtggcatagccaggagcagtgggcccagtccccatcccctgccctcctctgctggcgcatgggacaggggagcacttgctggacctaagccccgtcgctgccctgctggtgggggcatccaagggaggcctgggtggggtccactggggtcacagctcggcagagcccccaaggtgggctggagggtctgatggaaaggggcgcagagacggctcctaggtgcttgggctgtgggagggctgcccatggggtggcagggggtgggggctcctggggctgcaggatccccagcccccgctctgtggttgcaggaagcaaggggggctccgtgtgagtttggcagcgggagccttcccaccacggcgctgcctcagccagaggggaagcatggatagcggccactggggtcatggccggctttgggcgggcagggggcaggggacacaaatagaaaaataaatggcctgagtttccgacgtttcctggactcaggatgggggaggggcaggcctttgggccaaaggtgcggctggccctgtggggtggaccaggggtttctccccagacgcctgttggggccagggctgccccctcagacctccaaggtgggtcacatctcccccttagagccctcaggacagggccccgttgcccacagagaattcctaaaggcctatccatatgtccctgtccataaagacgtcgagtgtggaggacaccctggaggaggagatggaaccctcctgtttgctggggctcggcccccggtgaggctggctgcaggtgaccacagagacctagcctggtgtcgtgcggccgctgggtccgtgaaggggagtgaggcactcctcaccctgtggcagctcctagtcaggaggcctctcccctccacctgcacgtcatgtggctgtggctcccaggaccagcgcctggagcgggtgagtgaacgtccctctcctccgtgggcactgcctccgctgtgagccacccttcaggctacgtgcatttccgcctgttctcagggtttaaccgaaaccgaacattaaccgtagccctaacgcggctgagggatccaggccttgcctctgggccgggtgagagacagacactcgccaaccagtccgcagtggctccccgtgtgtgcgaggctcccgcctgcgtgtgtgcgtgtgcatgtgtgcctgcgcacaggggagggaaagttcttcagctgccgagggcgggagtaggggctggagcagcaccctgcggcgaggccccacaggagaatcgatggttctgatgctgtcagcctctgggtgcaaattctgagggcccgggagcgtctggcggccctgagcagcttgctggggaagctccgtggaggaggaagtccggaggtcggtaagctccaggaggggtctgctggggggcgagaatgctctgagcaaggtcccagaagtccagagctcctgagggacccgggaccaggggcactggggagtttcagggttggtcgccgccacagccctcacaaacgaggccactctctaggactggccaccttctcacctcggccacttcacagtcctggggggcagctgtggctcttgctgggaaccacctggacctccctggggcttgggggtggggtggtggtgaagtgaggcccacccgtccgtggctcactcctgccacctagaggccactgttcctcacaggctctggggccagtcacctgcctctgcccgggggcgggaccatcccaccggattgcaggttccctgatcaccaggatgggcctacacctctccgcctgcagtagttgcttccacgcaggactagagcatgtcagggttcggggctcctgtcatagcggagtggctgcggcccgcaggtcagaggcacccgacctcttctgctaacccccttccctgcctgtcccgtccgctcctttctctccatcacctgcccctgccatgaaccaggccaccagtgaccccatccacacctgtccgaccaggctccccacgtgccctaatgcagccccgtaggctgggcccacggctgacaccccttcctgagggatccccgacctgccagccgttgtccttaagacgccacagcatcttgacctccccgtctgcagcctctgtgggcctccactgggacccactgagacatgtcaggctcctcacgagctctgtcttgtgtggccatgcccagggccccaggacgtagaagaccacctggcatctcatggaggaggaaacagggcccagagtgggacctccactcaggctcagcaagggccgagtcccagttcctggagtcctagttgaggcccctcctacacagagcacaaggtggaattcacggggtcataaaggcagccagttctaccaacacacagttatgcaaatattttcttaaagtgtgatatcaaaacccaagtgcttctttaccaatctgctgaacaagatgtgactcactgaacagcctctgcagtcccagcagcagcgagtgtgggggtgcgaggcagttcccatctgtgccgggtcagccacgggcccagctgaccagatttggttcatggcctcgttcataactgaacgaacgacacctttctgctagaggtcggtataaaggagatgatgggccgggcacggtggctcacacctgtaatcccagcactttgggaggccgaggcgggtggatcacctgaggtcaggagtttgagactagcctcaccaatatgatgtaacctcgtctctactaaaaatacaaacatattagccgggtgtggtggcgcatgcctgtaatcccagctacttgggaggctgagacaagagaattgcttgaacctgggatgcggaggttgcagtgagccaagatcgtgccactgcactccagcctgggcaacaagagtgaaactctgtctcaaaaaaaaaaaaaaaaaaaaaaggagatgatggtttcttcccaccagtttattttctgtcaggggtttggtctctgggtctctgaccccctggattgttgagacgcctcgcactgttccctcccatcttgcccgaccgccccccaccagctcccaggcccagtatgtctctgtcccaccccatcgtctctataggccctgtcctgcagtgggttctgtccctccctgcagcttggtaaggttgttgaggcttcaatacacactccagaccacatccctctccctcccaactctgggacactctctgcacctctgaaaagaaactcccagcccttcttgtgcctctcccttcctctgggcaccccttgttccttatccatcctggctggcctgtggcctgtacttctgatctgcacacaggtatcacagaggacagagaccccagggccccagcccctggtgggggcggggagtgcaagggggcagtcgtctttgttctcgaccagctcccagctccctaggtaatgctttaagagttaccgtgctaggggatctttgtggctgaaaacattcagatgaaccagatatttaaaagcatccctcatgcaaagtccctccactggttgggccggcctggggagggtcaaggctgggtctctagtctggttttccgggggcgtctgtgtgcactccttccccagaaccttgcgcttgtccatcccagggagaaatcaggtggggagcggcctcactgctggctccttgatagtgacttgctccagaggtccgtgctgataccccagaccccgccccaccaacacttcaactgggactgcggcgtatgcacaactgcacagcctcctctggcagctccttgatgcttctgggacgttgaccctctctcctttgcacctccactcttaggaacttgcagctctctggggttagttctcctctgtgctgtctgggctgcacctcctgcccaggaggggcctctctgtgctgcagcccttaccagcatctcaggatctgcagtcctgatacttggaggtctcccccccacccccagcttgagggctggcttcctttcggtggtcttcaaatcaactcacactcggccgttggagaagcctatgtgtctggccaggcaggctccatggatgtggccagtgtctttgtggacggtgggaaccagctttgaaaccctggccgcccggacctccgaagccaaactttctggggttcctgcacaagggcagttccagtgtggcttctacaggaccctgaccagctccttggtctggctgtcagccattgagacagtggttgaaggctgggtggctctagcctcccctcgtgcctctgatgaggctggacccttcaagtcttcatatatgcccaaaccatgggattctgaccacgaggacttgcttggatggtctaggctggaagctatgtccccagctcactgtgaggggcagaatcagtcagtatggaaaccgtgttcatctattaataataataataatataatatcgcggggcctctgtcttagaaaggctttgctcctcacaaggaattctatgctttttccctatgattgagctttttttttttgcgacgagtctcactctgttgccaggctggagtgcagtggcatgatctcggctcactgccagctccgcctcccggattcaagcgattctcctgcctcagcctcctgagtagttgggactacaggcgcatgccgccatgcccggctaatttttttttgtttttttgtattttagtagagacggggtttcaccctgttgcccaggctggtctcaaactcctgagctcaggcagtccacctcccaaagtgctaggattacaagcatgagccaccgcgcccagcctgagtctttttttttttttttttttttttggagacagtctcactctgtcacccaggctggagtgcagtggcacaatctgggctcactgcaacctccgcctcctgggttcaagtgattctcctgcctcagcctcacaagtagctgggattacaggcatgtgccaccacgcccggctaattttttttttgttgttgtttgtttttgagatggagtcttgctctgttgcccaggctggagtgcagtggcatgatcgccgctcactgcaagctccgcctcctgggttcatgccattcttctgcctcagcctgcggagtagctgggactacaggcgtccgccaccacgcccggctaattttttgtatttttagtagagatggggtttcaccgtgttagccagtatggtctcgatctcctgacctcgtgatccgtctgccttggcctcccaaagtgctgggattacaggcatgagccaccatgcccggtctaatttttgtatttctagcagagacagggtttcaccatgttggccaggctggtctggaactcctgacctcagataatccgcccacctcagcctcccaaagtggtgggattacaggggtgagctactgtgcccaaccaagatgagtctctctctctctttttttttcttttgagacggagtctcgctgttgttggccagggctggagtgcaatggtgctatcttggctcactgcaacctccgccttccgggttccagcaattctcctgccttagcctcccaagtagctgagattacaggtgcccggcaccacacctggctagtttttgtattctttgtagagacggggtttcaccatattggccaggctggtctcgaactcctgacctcaggtgatccacccgcctgggcctcccaaagcgctgggattacaggcatgagccactattgcccggctaagatgagtctcttaactgaccatattttccttttcattttggctgcggggaagctcagttatatgtgattagtgccacagacagcccaagaaatgctcagcccattccacctgccacctggcctcatagttcgttggcctgaacttgaatgactacaggctccttgatccacaccctcccccaggattgtgccctctccaggaaaccacccagcatctgcattactggggagctgccaggcagtggtggggatgctggccctgcacctgtccccgtcctcaaccctccctaggcctgggccatctctctggctgcctgcagtctggccctacctagggacctccaacaacaatgtcaatgaacactaattgtcatgctccatcccctctctgttctcaggcatgtgatgtgaatcagctgacatcatcttgacgggagccctgtgaggcggacacttaactccagtttcacaggtggggagactgagacacagtggtcaacgtgcagagcccagaatctgctccctggtagctgactttgcaggcaggggccttgcccacgcagcctcggcagaggcccccgcacttcgcgaaccccagcaatggccccttccagacgccacgtccagctaccgcgcgctcacacctgcagggccccacaagaggcctcccagtgtgcgcgggcctcttgaagaagtaactctactcagaagcccgaatgacccaaactgggctctgggaggctggggacggccttctaggccaagtggggcgcgcgcagggctcagcggggcccaagagaagggctgagggcactgggtcctgagccacccaccgaaggacgccgcgggacagcaaggcccgaagcaggaggagagaagggagcagattcctgggcctcctggggcccggtcgctccgggatgtctgagctctgggaggggcgtgcccggggcgcctccctcgcggggtattgtgggatcacgagtcactggcgacggtgggtcaggactacacttcccaggaggctgtgcgcgccgcgtggcgcctgggagttgtggtccagagcgcgggcgcggcgggcgcggcaggcgggcgcgtggactacgcatcctaggatgccgcgcgcggccgcggggccgagggtttgaaccgggggtctgtcgtccgcggcggggctgcgtcggctgcggcgggtgtgggaggtggcgacggccggggccggggtcctgcccggctgcggaggcgggcgcgacgggcgcgggggtcgctgctcctgaggcgatgatgggcaaggaagaggagattgcgcggatcgcccggaggctggacaagatggtgaccaagaagagcgcggtgaggggcgcgggccgccaggaccccgggaaccccgccccgccgagaccccgtcgagcccgccgacccccgttagggccggaagacgacctgaggggcaggacgagacccctccccggcagagactaaccgggacgcaggggagacccccacccgtggccgagacccctgccccgggccagccctgccgttcactcccgcaaccccggcagaggccgcgatcaggcctggaccttgtcccgggagagccacccgctctggactcagacccctccctcgcccgcagtcacaggctccgcacccttccctgtcccttaactccagacccccagcctggcccgtcgactccttccttggccctgtcccgcctctcggagcccccggggtgttcgggcctcctctgcgggccgcgccagccccttgccttcctccatcccggcctgggcatcctcacaggccgagccccgccccccaactcagccctctcccacgctccgtctcttacagcgtttgtcaccctccgtctcccatagcatttgtcgccggcaacagtttggagtctgaggttggatccccttttcttctggagcttccgtgcctcccctgcctcttcccagcccttgtcatcctccttcacaggccagccagatacctgtcttgcctgtgggcccattttcttccctgtctgtccccaccccacaagaaccaggtttctctaataaattctctcccttctttagccaggacttagcccgcagcaacttgggttgtgggtagttatgtggacaccctccgaaaagagccggtgtgcttatataagagccaggaggtcgggcaagcctcctctgggagtgtctgggcgctggagcctctggccggctctgttcactgcggcctgggcctctgttgtcttgcggccacagcgagactttggaggaggctgtgtgtgaggactttgaaggggccaggtcagtgggggtccagttccagcgtcatgaccttggcaacctctgcaccctcccacagaagcatctttagaggatgctgcctgcctcctggggggtggggaggggtctggccgcaggtcatttggagctcctggctggctcaataaacgtgacctgtgctttcccacccagactgtgaactcctggggcagggccagctgtgtgtctgccaggccagcccagggcggtgaaggtggctgagtcatgggctttgggtgatttgtgcagccaccccagggctgtgtgactgcagtgggggtttgggggaagctttttgggctgagcagggttgagtctgggttcctgtgaccagcgttctggactggggtctgccctgggaaggggtgggctcccactcattcctgctgggtgcagcacccccatcattgcgttcacacacaccccggaaaactggtcagcacaaagtaggggtctgcgaaccattcatagctgtttccagagatgacccgagaatggagttgttccccttcttaaaggagacaaaacacaaacgataaaagctgtaggtgggagaagcaaagatgggtcatggagccaggggagggctgggtggggctgggcagaactgatggggggtttctggtggaagaacagcttgagtagaagccccaggggagaatgaggaggggaggcgggcgctgtgcagtggggagtgggagccagcagagcctcctgggggtcccagtgcctgaggtcccctcggggacctgggggccaggtgtgggggtttttttgcctctggacctgagcccactgagagccacgtaagcaggtgcagggctttcaggggacagtggccttggctctggctatcacctcaaggctggactctgtacagcccaagaggcagggcctgcctgggagggctcaggaggggctgcagcgtgagcagactatgccacccggattgctggggttgtgcgggcggtaggtgggacaagcccctcccatggcctgtgggtcgtgggactctgatcaggtcaccttagggcagagggaatgatacacacgtggaaacacatgcacgtgttacagaggagatggggtgttgcagggcacagttgcagttttaaacaggagaggccttgctgagaaggtgttgttgaaataaagcccgggagggagggagggagggagggagacgttgtgggaggccgccccaggcggtggagctgcaggtgcagagggcctcggtggcggctcagcgcccttggggagcactgagttgccgggcctggtgtggaaatgtgaccggtttgtgcctggcctcgtcagtgttgaggacctggaggaaacgcagatcttgggtggggagacaaggcggagagaacgaggtgcattggaacagtccaggcgaggggtgctggcctgcttgggggcaactcagaggcctggaggatagatgaggaggggggctgtgggccttgtaggtgttggctgtggccgtgcctggagtggagggacccttgaaagtttggcctcagctcgggacactgatgttcccgggttggcccttcatgagagtttggcctcagctcgggacactgatgttcctgggttggcccttcacagctggtgggcggggggtgctttggggagaggctgccctgcgcatcagggcatcaagacacaggggagtgaatgaacctggggctgcagtttcacctgggtgtggccctggctgctggggaggggccgtggctctgaagcctcatgattggccaggggagctggcatttctgttctggtttgggtcagtgacctgaggtggttacaacgaagtcagtgaggtcattgccacggatgtgggttacaacttggaatgcttgaggctgcagaacccctccccttcttgactgagcagtaagggttccctgctgtggtgcaggaacatgtgggcagagccctgggtgtctccaggtagaggaattttggtttctttttgaccccaggttgaatctccaaattgtcactgccttgtgttctcctccagtaggcagaaggaggtgatattgtctgttgagatctaaagtcctttatgaaggtcctccttctccttccaggagggagccatggatttgctgcgggagctgaaggccatgcctatcacgctgcacctgctccaggtaggtccctgcctgccccaggtccaggacagctcctgggtgcagcccaggggatggcagttctgagggcacctggcagggcttccccaccctccccaccaggccttagttggcacaaatgcctgttcctgaggagagggtctctgcctttctctgggctcagtgggacagggaggggagtctgaggataacccatcttgtcctccgtggctgaggctcctgggttccaaatgggacagtcgccattgggagaggcctctacctccctgggaggtcccgggctcctgtcctgtgggggccaccaaggctctgccaggagaatctgacccctagggtgggcccctgcctcccccaacccagaccacttgcctcgtagtccacccgagtcgggatgtctgtcaacgcccttcggaagcagagctcggatgaggaggtcattgcactggccaagtctctcatcaagtcctggaagaagctcctgggtgcggctcaggcggtgcccactgagtgctggggcaggggtcccagaagtgctgcctcttgctggtcagcacagtgtagagtgctggcagtgtccaccctgagccaggtcgcttgggagtggggcagtggcaaacccagaccatgaagcgcccagcttggggctggcagtggatcagtgggtgcctgtcagcattggctgggaggtgtggcctaggaggccagggtgtgtgctgggggcagggttccaggtagaacaaggagagaagagagttgaggccaggacttgaactgacagcactgagagactggggtgagttgggaggtcacacagaggggaaggtcatggccaggaggctgggaagtgccgggagaggggaagcgggagggagaaggcagggccacctcagctactcagagggaacagaggggcagccccctgccagggaagggaagggctgggctgggctgggctggactgaaggctgcctcttcctggagacagtggggtgactggggttgcaaagatgctgctgtctgggatggaggcaaccctcctagctctgtccacacccttgtgaaacagtctctctccagccctgtgtggccctcaggctgtgcatggcacaagcatgtcctggtccccagcccttgggcctggctctgggctttcaggaagagccttcttggggacatgcttggtctctctggccaggacaggcaggagggtgggccccagagaggccccagaggtggcctttgtgagtgggtgcttgtacgggaaagggttctggggaggcagcctcaggactgcagagatggacaggttgctggggagggtgaggacctgttcacagaggctgggcagcctcctggcccctggctcccctggctgggtgaggggctgggggcgggggctggggctggggccgtgttggtggtcgggctgaggctgtaccttggtggtggtctgtgcccctccctcctctgcctccccttgatcagcccatccccgatctttcctgcagatgcttccgatgccaaagccagggagcgggggaggggcatgcctctgcccacgtcctcgagggatgcctcagaggccccggatcccaggtagcacacctggaaggcaggtgcacacacttctgcttcccagcctgtttccttgccagagaaagggtgccagtctccatgtgcctaggcactgctttgaggctgcacacagagtcggtcagcctcatgctggacaccagccttgtggtgtgtcccgcctgcactgaccacttgagatgtgggtctgtgtccacctggctgtcagccagccatcctggcctcttcctctgccaagagctgctgtataccctgagtgggcctgtgggagccccctggcctcttcccccaaggccccctgctgggtctggttcttgctggcccactctggcttccccctcagcctcactcaacgacggtccctccttcctgcaaaattctgcccagaaccaaaggcgggggccaactcccctcctgccctgcatgtgcacgtgtggtcactgctgccagggggtgataagggctctgtggcctgcagctgggagctgggggtgcttattgtggcaggctatagccgagagatggctttgcccttgaccacactgggttgtggtgactgggccaccaggagctcagggacacctttgcaagttgattttcctccaggaagctgcctgcttctgccaacttccacagaggggatgaggggagggctaggtggatgcagcctggtcgttgggcagccccatgttggggtccagccctgaggggcatccttctcccattctgtacgtgcccaggggtgtcgtctgtgacagcagaacctggccttgggcggccccgccttgtctccccccagacagctgtgggtctctccctctccctgaccaggcagcagctgcagctgccctcagcagagtatttgtgttgcggcccagtgggtgggcaccccagaggtggcaggaactgccaggttcattctgatcgactggtaatgctgcccagatgctgactgctgggtctgggatcctgttcccacctggagagtacaccctgacccactggggacctcatggccctctccctcctggctgctgggcacaccccatggacatctgggctggactcaagataggcagggccacaggccactgttggactctggcagagtagaacaagcaggggttggtgggggattatgctgtggcacctgctgcttctaggaccagtgtctcgctggggtgcctgcagccttgagtctgaacccagctggccctggctctctgcagccgcaagaggccggagctgcccagggcaccgtcgactccgaggatcaccacatttcctccggtgcctgtcacctgtgatgccgtgcgcaacaagtgccgcgagatgctgaccgctgccctgcagacggaccgtgagtgcggccggccctggctcctgacacccgctgtggttcacagggtggcccgggcccctgcctgcccgcagaggcctgcttccagcggggtgactgtcctcccccagcccattgctgtggccctggcaggggctaggggcctgtgcctggatcgtgggcctcttgcagggacccggatgtgccctctaagctgccagggtgttttgcaggcagaaggggtggcaggtggagaaaccagtgggggaagctagtcagggctccctcttgcagatgaccacgtggccatcggtgcggactgcgagcgcctgtcggctcagatcgaggaatatatcctttgggtaggggctgtgggcctgggtttctggtggagtcaggaggctgcctggcctggtgccctctggtggctgctggatgccactgcccagctgtccaggggtcacctgcctgggtggtcacctgcctgggtggtcaggctgtctcacctcaggagggcccccggaccagctgaagggctgattctgtctgcttgtggggcctaggtcccctggggctgtagcctgaagctgggtctcagtcaggaatgggcctggggcaggcttggccctgcagcccttcacctctccaccaggtgtgggtgggcagaccgacccctgtgtggctgggcagaacctttccagcccccaccccaacatggcccccagcggggcaggtggtaggtggagggcagcgacgttgtcctcaggtgggtccttaaaacacttgcacgcatcttccgggacgttggaaacacagacatgaagtataagaaccgtgtacggagtcgtatctccaacctgaaggatgccaagaaccctgacctgcggcggaatgtgctgtgtggggccataacaccccagcagatcgctgtgatgacctcagaggtgagcccctgttggaggggctggagggctgctccctcggagcggtgggctaagccactggccccgtgctccaggagatggccagtgatgagctgaaggagatccgtaaggccatgaccaaggaggccatccgagagcaccagatggcccgcactggcggcacgcagacagacctgttcacctgcggcaagtgcaggaaaaagaactgcacctacacacaggtgagcggccgctgggcaccctcccccgggcccggtgtcttcagggcatctggtgcccctccttggagcccatgcctattcccgcctctgctgcatgaatttcccgagcctctcagtccctgagtaggctaaggcatgatggccaccttcagggaccactcccctctacccaggacctctgggctccacggggcggcgtcttgggtggtgggacccacttgttgcggatactcaagtcagagggcctggcctggcccagcccagcctgaacggagggccctcgaggtgttgatgttggtgggagggccgtgctgcctgctgcctggcagtgactgcaggaccctcagtccctgccatggaggtggacactgagtgtgctggggagactgtggatcccatgagatggcagggaccctgttaagaggggagtgcggctgggtgcagtggctcacatctgtaatcccagcactttgggaggccgaggcaggcggataatgaggtcaggagttcgagaccagcctgaccaacatggtgaaaccccgtctctactaaaaatacaaaaattagctgggcgtggtggcgcatgcctgtaatcccagctactcaggaggctgaggcaggagaatcacttgaacccgggagacagaggttgcagtgagtccagatcgtgccactgctctccagcctgggcgacagagcgagactccgtctttaaaaaaaaaaaaaagaggggagtgtgtcgaggcggccgctgcacctggcagatgggactcgtgaggggctgcaaggacagcctttccttcccctcgaaggctgcatggggcctgggtcggtgcagagcctgcctctctcctgctcccagccactggtcagaacaggctctgcctgtggccggaggctcacccttgggccttccggaaggcagccgcgggcactggggacccctgctagttccccccaccattgggaccctcttgccctcagccaagtctgggccctcctggtccccagccaatgtgagctgcttcaggctcacacaagggcctctgccccgataaactctgtctccctcccccggaggctcagctttggaaggttggagtcacgaggcggcctcggatcaggtcacctgtgggagctcagtggctgcgaggcccgcactgcccatgttgaggggatgccgtctgcagcggagcatggaggtgaccctgggttcacccagccctgttcacaggtgcagacccgcagctctgatgagcccatgaccacctttgttgtctgcaacgagtgtggaaaccgctggaaggtgggtgagcaggctcaggctgcccctcccagctccattctctggaggtggggtgtctcagcctctgtggggtctgtggtgtgaactggggatggccctgcccaaccagcctcctgggagtcttgggcatggtgggtggagagcccagccttgggtgagcctgtgcggccttccactctgggggatctcatgtggccacaaggctggaggcctcaccccctttctcgcagttctgctgacccctcgtgtagatgtgctgcagccttgggccctccccggcccacgtcctccgttgacacagcttctctggagaccctagaaggcggcatgtcctgccctcaacctgcctgcctggattgcacctttctgccctttccccctcattattaaatgtttctttttgccatcttgttctcctcagccgttactcctggtgggcccctgtcccccatgtttgacccgtttccactgctgtggacaaggcccctccctggggttgggcagtgcttgggtttggccctggtgggtcagccccaggagaggagcttggctgaccttcagagatcacctggggcggctctgcctgtgagggcaggtggggagagggtcttgtgtgcgtcctgtgcagggcagtgtcctccccaacgcctcaggcatgggcagctcgggacctctcggcacttcaggacagcttgtccccatgctgccttctctgttcttgtgggagttgtggtctcagggccctgagccaatttcagcttcaactcacttaacttcccagaaatgcaggggatgggctggtgagcactcaactcatggggcctgtgagatgagaaagatgacattgggcctggcaccaagtggcccctcctgccccagccagcctgcctctggggaccccgtccggctgggcctgggcggcacctcctgttgcctctcgacttctgaggtgctgtgggtcactgttctggcccgactttcagctaaggaggctgaggccgagggcgtggagctcatgccccgggcagggttaagcacagccacccactgggaccactgttctgaggaggggtctggtggaggccagggcatgggaagagggcaagcacacggctgtgtgtcccctccaaggggcactggagcccctgccctgggacaaggacacttctccccagccctgagtctggggccactcattctccagtctctccccagacttggacaaaaatgagtagagactttgctttaaaaatatcttcaataataagacatcctatttttggggggttagggatagagataaatatgaaaacttttttttgataaaacacctagtaaggacatgtttccaggtttaaagttcatgaacatataaaacagaaattgggtcctgccaccttgagtgcaggattctgaggtcctaaatctggttctgaggttctgtgtttgattctggggtacagacagctcaagtaggaggtctccttatgtcacaaaactacacgatgcggaggttctgttccccaccaaaggcttgtctggggcccattggctgcctggggaggaggccccagcgaggctcatgggtccagcatggctcctggggggacccctactctcaccacgcaagagcccccagccaggagcactgggccagccagctgcgggccgatgagggggcttctggcccgccctgcacctggaggcccgccctgcacctggagttcctgcttggccacgggtgggcagacccaggagacacagcactccccactgggtctaggaccgtctccgcgggtggggaccccagccggccaggcatgtgccctgacagccctgccgacaacaacacctgaagggaacccagagtcggccgtaggaggcggcggggtctgtgctgctgggggcggcctaggcctcggaggaggactgtgatggcccctgcagcagcagggcacggtaggtgggagagctgaggaagcgggggtaggagtcccggtgcatgagcgtgtagatctgcagctgcgcgtcgtcgaacgtgtgtgcggacggctcctgcatcttcttgttgatgccctcccgcacacgggagtccaggctcacctgcaggacaagacactgaggtcagggggtgcgggagctgccttccccacctagtgcctggagcaggcggcccccggcctgttctggtgtctggcgcacctccttgggggacaggatggatacgtagtcctcgtagatgagcctcgccttctcgtctaccacatgctggttggcctcggccttcagctcctcgcaggccaaccagaagagcatgttctcctcgctgtactctgtccgcaggaacgcccggaacacgctgcgtcccgctgggctgtgcatcagcttgtcaaaagactgcgcccagctctgcacctcctcaggacttggcgtggcactgtgggcacgggggccaggctatgtcaggcccgagtctcccggtctggggcccccccagcacgcacacaccagccggctggactcaccatacttcacagctggggaggggctgcagcttgctctcccgggaggcctgccacgcgcgccgccgctcttggttcctagtggcagagaggaagcagcgctgccgtgggcacacacgcctccacggccacacaggccctcagcacatgggcaggcacctgacacacatgggcacccactgcaggagggcagcccctgcaggcacctgacacacatgggcacccactgcaggagggcagcccctggagctggctcttcccacactctcccacactcccaaattccccacagaatctgcagtccaggttactgtccctgccacagtgcccagaccacagactctgccgtcttccattccagcagtgtgacccagtgcccgcgagtctctggccttccaggaggggcccttcggctcctggtgtgctcctccccatccctggcccactgggcaacctcctccacccacccatgcccaccccacatgaggttgagaagcaggtatgccacctccccttctgcctctgctcccctgggggagatggggtggggcaagatgaggggccacaaggagctgggagatccctgaacacctgggaggccagaagggtcatgtgcctgggaacagggccacccatgggaatgtgcctgggaacagggccacccatgggaatgtgcctgggaacagggccacccatgggaatgtgcctgggaacagggccaccctgctcctgggcctgatcttggcctgtccctgtcccaccgatggggtcacacgctgcaggtctggcgtgtcagcagtgtctctcgtcggctgacgcaggtgagagccccaaacccgtgtccacactccttcaggttctggagcctgatccccggttgtctcaagggaagcagcttctttgccttggctcctagcatcctgtcagtgctggacccaaatccatacccggctgacctctctccagggcacttggatggctggcagacatcgtgcacccaaacgtcctgacagaactaggcccctgggctcctcccaccccctttcccgactgccccctggccacccccagcttgcccgtgggtcagctgacgccaccttggatccagaagcgctgtcctctcatcagccagggcctgaagcctgaatagggccaggcttctgcaaggtgtgaaaacatccaccagctcccctacactcctaggaaatctgttaccatctgggagccccactcccaccctcacagggatgcccagagacgtccccgccaccgccccctgctcttcttcccccacgcatgctgtccgggaagctcttggccatcgccccagggccagcagttcccttattggggtctctgttcaaacgtccctccaccccacacactgtatggggtctgtgcctgtctttctttctttctttctttttttttttttgagacggagttttgctcttgttgcccaggctggagtgcaatgacgcgatctcggctcaacgcaacctccgcctcccaggttcaagccattctcctgcctcagcctcccgagtagctgggattacaggcatgcgccaccacgcctggctaattttgtatttttagtagagacagggtttctgcacattggtcaggctgatctcgaactcccgacctcaggtgatccgcccaccttgccctcccaaagtgctgggactacaggcatgagccactgcacctggcctgtgcctgtcttactccaccgcaggcccccagggcctagcctgggctggctcacagcagcatggataaagcacatgccgcgtgaacgggcacatgcatgtacacagcacacggacacacccttggcaagacaggtacgagagccatacatgagctccctggggccaaggcaccggccactcatcaccagggcccaacagaccctggacaggacagtgctgtgaggtggcaggggcatcctgcctgcggggatgcctcggaagccaccactgggtcccctcctgggtctgcttggccccatgccctcgaccccctcgccagctgggcaccccaggccctactcaccaggagcagctacagcagcagcaccagcacaggcagcaggggttgcggctgggggccgctggagaggctgtatcatgactggacattgaagggggccggtccgcctcctctggccctgtgatctggggaaaagtggggctacctcagctttcaggtcagaacccaccagactctccacctctcccccaccttcccatgggtagccctgttcccaggcacatgacccttctggcctcccgggtgttcagggatctcccagctccttgtggcccctcagcttgccccaccccatctcccccaggggagcagaggcagagggggaggtggcatacctgcttctcagcctcatgcggggtgggcatgggtgggcggaggaggttgcccaggctccgtggtaccagctctcagaccctcaccacagcctgggggtctggggagaggggccaaggttctgactgagaacctgaaaccccagcccctgcctaccccttaggaggggtcctgagagggtgtctccctagcggggcctgctcctgcctctggacccagctctgcctagggcttctaccccgaccccaagcttacagcagggctgggagggggtccaggatcattgaggagggagctgcagcagcttctggcccctcctcccaggctgggccccagatgaggcccccactggaggttccgagacacccccatccgctcactccctgggaagccggaagcctgggttcctctttcttggtttccggctcccagcccctcccaaaggggccccgagagtctggggctaccaactggtgcgtgcgggtggtggccagactggcttctagggtgtctggggtggggagtgggcagagtggcttcccaccaagagtccaggtctgtctgtgggtcccagaggtctcagccaggggcagcaggctagacctgcagcagtgaggatttaagtgggactcaggctggacttgctgagggtgtgggaaggggggcagggccccggtgaggagggacatgccccccaaacatggttctttggtcctgctacctcccacccaagacttccctccctccttgcccactgcctctaggctgtgaaactgctgtggaaccaaggccctaccacagggtgcgccagccagggaagtgggggtggcaggggtggggggcaccctgctccccagtcgaagcctcggagtccctgaggggggtgtggtgtggtgcatgtccctcccagcatttggttgcaccgtctgcaggggaggtgcaccaggagcgccaaagctgtgagtggccctcatgccacctaagatgccacttcgaatcccaagtctccttgggcgatggtacaggggggccaatcagtgccccggaggcagttgtgaacacctgcgcccacttctgcccagggcagggaggggcctccgtgcacatccgccaccctcctcatgtgccgccaccctccctggccaggaagctcacaacttgattctactttattttctcaatcttcatccccccgccacgcctcccctagctcgtggcctttgaatgcttgtttctggctggttggcttctcttggcctcctgggacggtgtgtgaatggccctcagaagagacagtgctggagttctgcactcttagggcccccaatacccccgaggcctgggcatgcagaggccactgccctggcccaagtctggggcaggtgcagcatcccctgggaccttggcccctcaccaccggcccagtttcctctgagactgggggtcccacgggctcctagcaagtagatgaggagaccgaaagtagccctgcagctgggctttctttcaggggtcaagtttctagggaaaggaaggggcgtggcaacctgaggtttggtagctgtacccagacggggctgtctgtggcttccccaggcagcagttcttcctcctctctgtccccacccagggtcctcccccacactctagcacccctgagactgtccccctgggctaccatctccaccccagctctgaactggaggaggggacgtgtttaggggtgcagggccggggtgctaggggctgcatttgctgcagagcagggagccagccccttctttcccagttgcaggccctggacctggtcacctgtccctggacctggcttcctgtacccttctcaggtcaactggggcaacccatgtccccaggctaccctccccccgtctctcctgggggatacagagtctcaactagggtcctcctgcttgtcaacctggcattggggacccccttccccagcctcccaggctttggcccccaagtctgggatgggataggctggataggcggcacgtctgctctctggggatagaggatcccttgggagtggctgccgctttgctccacagaaggaaaaagaacgtcccagagcctgcccagtccaaaaaaagaataagaaaatgtgacaatcccagaaaaaaatgtcataacctttgggaggggggttgaagaggggctccattctcagtccttagctcctacccagggcctttcccatctgccaccctccacatctggctggtgggcgagccctggcctggcccctccagggaaggccagctctccccacctctgaaatggtggtggtggcccacccaccacgctcctctctctgctgttagggtccagtctggagaagcctgtgttctcctccaggtgcctctttcttcagcctctgacgcccccacccctacctcaaagctccctactcaccagcgacccaaaggcggggtgggggcaggaggggccaggttgggtctgggccccaccctggctgccgaaggggcgtgcactgcagcagcagggactcaagtcagacggcaggagggactcctgcggcgctctggagggaggctagcgccaggagcccccgatcggctggggccgggggcgcagcgcctcccctacagctcgaagggctgagtggctgccagatccagcggggtgggggcgggggcggacagggtgtcccgccccggcccctcctcaccgggctgagagggggagggagacgcggaaacctgggttcttccggcccccacctttgagcaatcacttccccaggctttgagctccagaaaaaggggaacccggctgcggcgccccctcccccacgcgcggggggcgggctccacttccactgcggcccagggtccacgtggacctggcggcgggagcccttggggttcgagtcccgtgcgccggctcccgaagctcccgcccagcacggtccccgggcccgggccgggaggggcagggccgctgtccccggcgctgcgcgcgcgcactcaccagccgcgctcccgagccactcgcgccgccgccggcccgcgcgctccaaggtccggcccgacagtcggggagggggcgcgggggcgcagtgcgcaggcgcctcggcggcacttccccaaagccaggggccgggacttcctcgcgccggcggtcgccgggcccgccccgcccgccgcgccccgccccgcgctcggccggctccgcaccccacccgccccgcccgcgcgtcggcccccacagtcgcctgggggtggcccggagagtcgaggtgctcatagtggagccctggctcccgggcggacggagccgcacggtagtagatgggggtgtggccgtggcccccgactctgctcggcggggccgttcctgctttgccatccgtgtgggacttccacgacagtggaggcacgagagctgggccccatatgctgcttgcccagcttgggaaagaggaggctgctgcaaaggaccgatcggcgggtacgccagcccggcccacccctcgcctccgtgagccgcgtctgtaaaactgggttaagagccgcctgtctgtgctgtggggggttcccaaggaagggggagattcctgtgctgcggggctggggagaactgggggtgcgggttcttgcatccggagtcatgccgaatgtctcctgtggggcctggcagagtccctgctgacccgtgtgtcccaagatgtcctaaagcttaaggccacactgtcccctttgccacgaacgccctgtccctttggccgactcttctcatcctttatgactcggtacagacgtgggttaggcttctcatcgcagcatgctttggccctgtgtcagggtggccctgaccctgctctggaagtgtctgcagagcatctgtgccccccgcccctcccctggcccggctgtgtgcagctcctgtcctccccagcacaagcactccacccggatagttcccagtgtcgggatctgttcataaaatgccttccagttgcacaggtcaggtgcacaccttacaccttcacagaactctgaggggtgcaaaggcagctggagattctacttgtattcctcattcaacggacaagtatcagtatctgggtgcccctgtgggccaggcagtaggaccagaagccagcaacatagatcagcctggatcttatgctggggggcgcagagtgagttgtggggagcaggcagggaaggcctgggtgagaggggggagggctgaggaggggagggtattgcgctgctgagcgggggcgggggcccgaagggggaggtcagaggtcagagggccctggaggacagacaggctgcctctcgaagctgtacccagaaccctgtgactgccatgttgtcaggccaggcaaggaaaggcaggggccaggaagcccacagggacaagaggcaggctgctacttattcagcccacataacactcctgagcggtgggcacaggtgaggtcagggaagctcaacgaagatgggccagcacctggcccaggccacacacaaccaggctgaccccgctgagccggcctgttgtctctgctgtgggaaaatgcagctgtgggcagctggcagggggtgaaggtcagtgccctccctgccccctcgggtcactctacaaccccccagtcattcccccgtctcctctggccccttgggcctgctctccaccgccctggcttctgcctctcggcacacagcatcctgaagtccatgggtggggccaggtgagctgggcagttgatggcggagctgggatttgaacccaggaccctctgcgccctgacagccctcaatatattgggctttggaccacatgccttccttcccatagagctttctacaggcaggcgtccctccaggccccattccccagcctcctttgcacatccagcaccccctgcgccttttcatggggatcaaagggcccgagtgccggcctgaccctggtgcagtcactgaggtcactgtcttgctggccttctctgggtgctgggtctgctgtgcctgtctctgcccctcttccctcttgcctgtctgatgcagagtgacccatcccctttggagcacttgctgctgtggggtactgcaccaagacccttattttaaagataaagaaatggagtctcagagaaatggtgaaataatatgtgattctcccagtagatgaactcattctaggcactcagtcaatccccaagacacagaatcctggggtccaggctgcagggagtttggccagacgacaccagggctggctgtcatcacatgtcacaagcacatcagggtgtgagtggctgccactcctggacagactgcctcccttccctgtctgtctgcccctgctcaagccccttctccctggcctccttcctctctacccttcccttcctgaaacccctcctgccatctctctgtcccctccttgtcagctgacttctgagctctgtatacagtctgggcttgggtcaaggccaagggcagcaacagcccagaaagagtaaagtgctcggtgcacggggagaagggctggctgaggggcgagtgcgcagggctccaccccctggccggggctggggagaaacactggctgccatggagcaggatcccttctggaccccagttctgacctctgcccctccttccagtcagctggagccccctagcaggaggagcggtttgtctgagttcctgcggtcccgcttctgtgcagcctgctgggcagggggctgggagggaggaaaaggaagcgggggcctagggaagccccagcgtctgcaaagagctcacgtcggggagaaaagtaaggtctgcccagaaacctcggggcttttcagagtccagggattttgtaggtcgtgggcctgtttgtcagaatgggacaggggtggcttccttttgtactgcatgcgtgagtgtgtgtggggtgtgtgtgtgtgggggggtgggtgtgggggtgtggcatggggcattaaaggggtcacaggaggctattcaggatggaaaggaaggccagagggtgggatttttgtctgggggccgcaggggttccccttgcccagtctcttggtcctcttgggcacagctgctgcttcttcaaaggccagcttaggtcacttccgctgcccacagcactgccctctccctggccccctggtgggatgactcgcactcgagaccactgcagcctgaggctacccttacatctgggggtgacttctgctgaaacaggctctttctccgtcctccccaagactgggggcctcccatagacccacagaacgccaggttgccagtggggggcagatcgggattaggggtaggcgtgtccctgacctgttactttcacacccacccacttgcgtctccccacttttttgggagaggccccactctctgtaccctgatgtctgtgaggtgcatgggagaggcagcgtccatactccccgcttccctcggggtcctggggagtggcagcaaaaagaccagcgagccttcggagaattataactttatgtgggaggctggggcgcgtcgcacactctcagtcgccgtcaccgcgggaagatggtgccatccacgttctcctccaggatggtctccacgcgcctccgctgccggggagagaggctggggtccggcgtgtgcggaggcgggcagggcccctcccctttccccgcccctaccggggcttgtctgcacctcttggcggtccagggggtccgggatccgcgcgggcttcagctgcggcggcaggaacagctccagccggatggcggcgcgcgcggacttctgccgctggatgagcagcgcgatctcctcggcctgcggggcccgggtagctgagcgcgcgccgagccccgccccgccccgccccggccggctccgctcaacgctcccggtgcgccccctctgccctccgaccccctcgcctcacccgcatgcgggtgtagcgcagccgcagggcgcggactcgcccgcgggcctccgctgccttgaggacgccgaggagccggttctggcgctcggcgggcagctcgagcgactgcgtccacgggcgcgggtcgggcatgcggtaccccggttccaccgacccgcacgggaaggtggaggccgccgcgcccacgtcctccagcaggtcgccgaagagcagatggcggtggcgctgcgcagggagcatggccgccagtccctgcggcgtcagggcccagcccggcttggggggctctgtcgcgggcgcccccttggcacgctcctcaccctgcgccgtgcctggcgcgctcttcccgcttcgctcccgcgggcccttgcgcccgccctccttcgctggcggcggcatcctcccgccctgcggagggaggagggcgtcccgtcggtgccggggctggcaccgggccctgcccgcccctcggcagggccccaacgtgcgccccagctcccgcccgctgggctctccgcagtcggttttgagttccgcacccccagcctctgagctttgcccaggcgctctccctctcccaagcgcacgtccccagcagctctgccatcggctgatcctgctcagtcctgcagtcaactaggactttctgatcaactcagttgtaggaaatatctttcctacccgatggactgttctgtttgaattgagaaaatgctgagaccccactgggttgatctcaggccctgccacatggagagctctaggtgacgcctgggggaccttcgttgtgcccctatgtctgcggtccccgacagtcagggtctcccaccagacagctcgctcttgcccttcgaggcctagatggttgtggggagcagagcctagagggcaggtgacagaggagggagggtccaaaagcccagctggctcctcccttcccggccccagcctacagctgccaccttgtccagccagggctgggctcgctgtgccagaggcagagccacggccagccccagcggcggctaacgcccccgcccctccttagctcctgcagccgaggcccagcccccacctcttggtccctacaccccctgcttgctgccttctctggtcggaagaacctccgccgtagcccagactctttgggcttgttgacgcggttgcccagcaaccgggagtcctgcccctccctcgaccaggtggggcgggtcgtggcggggggcagggtcccctccggagggccctgggttagagtctgggcgtggacgcgcccctcataggggtcattggggcatagaggcatagagccggcttctccagcttgggtgagcgtcctttccaggcggccgcagacgcgccatcctaggggttgtgggcccaggttcctggcttgaggggtctttggggttagttttgtgggtggggccctcggctatgaggagacctttgtggttaaggcccattcccttctgatggccagggggctctggccccagccactggtgttcacagaaagggataatggggcagaactcaggacccctcacctcttctagggcaagtttggggtctcaggggtcctggtgtccccaggactagagctgggttttgctgaacactgtgtcttgggatcttgggtcctagatactagattttggaaatctatttgtgcattcctttgttttgtaactaattctcaattaactacttaatcattttataatttcttcaggcactcataagtgtgttctagaatttcctaattcacgtgcttattccacagtttaaattaggcaaaaattagtgcaaaaagtccaatctgttacgtatctattacttccacgagatgtctgtactctctctatattcacagacctgccgctgggacaccttgctgggagtttggaacctgtgagtttgggagtagggctgtcccagctgaggagcagggtcttagctgagcttctggccttttggcaggaggctgttgggtgttcccattgtttttgggagactgccctggcctctcagtaagagggtaaattttgacattcagccctatgtcccagagccggcaccccatcccacagctaggcccatccttccagccctcaagcttttgctgctccccaggaaggcccttcctggtgctgttccctcccctcctgcaggtgcctttggggtcctgcctgggctgcagcaccagcttggcttgaggaaggtccctggtctccagaagcagcagtgactgcttagggatgctcacccagcagccgctttctctgggcagcctttgtgctcccataggggtgagtcctttgagacagggacctgggccatcctctcagcttccctgggtccaggccagggggacacatgggtggggcactttctggctcttggcgtttgtgggggagtcacgcagggagtaggggaatattcttctgttctgcaagaaggggcttgtaacctctttttataggactggaaaaccttgacaccccctagtccataatttgcagcaggtactcccagggcctacctggctcacattcctcacccctactgtttctccacacgtttgcagttctgcaagaagggaggtgttctctgtgtgtttggggtccagcaactgtgagggacccagcaggccgacacctcccatctgtttctgtccccaggattcacgtgtttttcaagggctaacggaaatgctgagatctaaaagcatgtttattgctgccaaggcctgacgatgaaacttcaagtcaaattagtaagctttattaatgactacaaaatttaacatgatattgagaagctacaactcaattttttttgtcattgtatatagattttgtaaagttaaaatcacaaggacaaagtaatttattttgatgaaactcagaattgttaaaaattctttcacttttttaatagcacaaatgtgcggcctggtgactggcttccctgggggatggctgctctgtgaggggctgccagaccctctgccttgattcctgttcttggccagcccagggtggtgagcctgtggaaggaggagggtagactgtgcctgccctgggggtgggagtggggaggacaaaagacagtgttccagctgccgtctggcgtttgctgattctgagtcactggatgagagtgaggtgtgtgtatttgcctgctgagtgggtgtgaatctcaccccggaacccaggcctgcccaaatacccaggagctccaagagcagcctgtgtcaggctttaatctgtggacacaagctctgtgctgtcattcgcgtgtcatcgttcgtgtcttgggctatccctagtatcctcgcacacaagctctgtgctgtcattcgcgtgtcatcgttcgtgtcttgggctatccctagtatcctcgcacacaagctctgtgctgtcattcgcgtgtcatcgttcgtgtcttgggctatccctagtatcctcgcacacaagctctgtgctgtcattcgcgtgtcatcgttcgtgtcttgggctatccctagtatcctcgcacacaagctctgtgctgtcattcgcgtgtcatcgttcgtgtcttgggctatccctagtatcctcgcacacaagctctgtgctgtcattcgcgtgtcatcgttcgtgtcttgggctatccctagtatcctcgcacacaagctctgtgctgtcattcgcgtgtcatcgttcgtgtcttgggctatccctagtatcctcgcacacaagctctgtgctgtcattcgcgtgtcatcgttcgtgtcttgggctatccctagtatcctcgcacacaagctctgtgctgtcattcgcgtgtcatcgttcgtgtcttgggctatccctagtatccttgcatattgtttcgcctgcccagaacatgtgtgtttgaggttgtcttgctctctcatataacatgtgcctcttgctatctcttgtgtaacatatatgttctatataggaccctgattctaccttcccccttctggagggaccaccccacccttggcaggttgggggagggcaggactctattaggggtctagagatacctgggccatttcatctgcaccaccagttctcctccgtgggagcgtttctgggtccagggctgggcccctgccaaccccagggagcactgtcagtgtcacacctggccaatcccctagccaggtgaccaggcctgtctttcactctaagactgcgcctgtgaggggccaggtgcctgcctcctgcggggctctgctgaccacactctcagaggatatctgctgagaccagagctcacaggcctagcctggcagccgtattactgaataatggccaagttaggaaggttcccagggctgggggtcctggggtaggcttcttggaggaggtaggactggagctggctggggtggggcaggatccatgcaaggggccagaatctgcacatgggccaggatctgtgcattgaggccaggatctctgcatgggggcaggagtctctgcggggaggacttttagggggtaacaggatctgtgcagcgtgcaggatctttgcagtggggccaggatctgtgcagtgggtaggatctacattgggagtcagtgtctgttcaagggagtcgggggacaggacccgtccagggagggcaggatctgtacagagggaccaagatctacgcacggggatagcatctatgtggggtgggggcacggtctgtgccaggttttgggggcactagatctttgcaggtgtggccaggatctgtgcaaggggtaggatctgtgcagagtggccaggatctgtgcagagtggccaggatctgtgcagggaggccaggatctgtgcagagtggccaggatctgtgcagggaggccagggtctgtgcagagtggccaggatctgtgcaaggggtaggatctgtgcagagtggccaggatctgtgcagggagggtaggatctgtgcagagtggccaggatctgtgcagagtggccaggatctgtgcagggagggcaggatctgtgcagggagggcagggtctgtgcagagtggccagggtctgtgcagagtggccagggtctgtgcagagtggccaggatctgtgcaaggggtaggatctgtgcagagtggccagggtctttgcaagggggcaggatctttgcaggggggacaggttgtgtgcaggcaggtgcgcagggtcaatgcagggggcaaggtctgtaccgtgggctaggggtctatgtgggtggggggcaggttctgcgcagggggcctaggctgttcagcatgccagggtctgtgctgggggtttgccgcaggcacaagggagggagaagctgtcctgggttctatggttatgaacatgtcagggcagaatgacacagaacacacaagaagttcaagggaacacattatgagattgtgaacacctggactggggaggccacggccttctgctggaccctgaacggctcccacagagggagttgaggtctctattgactcctgaaaggccaggcaaggcagagctgggagctgccttggtgggggtgcaggtggctggttgctattgctgggtgagaaggcttggggtcaaaagaggtgggggtcagggagctaggtctgacctcgtcccccctcctttcttcctgtcctcctatccccagcgtgttttcctccctcttctcccatccttccttacccatcctctctcttgatctctccatacttcctccccactcctttccctttcctcctcctccccatcccaacccctcatcctccctgtctctgcctgtagggaggaagctgtggggtgacccaggtggaagacagacatgcgaagggagaggtgtctgcagtagcagggatgaggtgcttgtgtcccacactctgccctggcctctgacactggttcctggtccggggacatcaggttgggctcctttgtccttcccttacgaggtctctgctctgcccaccctcagtgcctacagtgcccaggctgggtcccaggctgggaggcaggctcaggaagctcgggtaggagggtctagggtctcctgctcagacgttggtgagcccagctggggcggagggctgcaggagtccgagcctgcctggattcctgccccctctcggctcctgaggtcagggggctcaccctcgagctttgcctggagagcgtgtttgtgcatgtgtgtgtcctctgggtgtcggagggccttggtctgtgtctgcctgttcccaaaggtgtccatgcacactctaggtctacccatgtgcctgcgtgcacgttggcgtcatcttgcatgtgtgtggcccgtgtgtttgtgcatccctgtgagtgtctgcatttctgagtgtgtacccatccatgtctctgtgtgttcacccgtatgcctgtctgggcatctgtgtgtgtgtttgcaggaatgtgtgtccccatgtgtcccttgagtgtctctgttgacgtgccccgtgccttcacacgtgtccctgagtcttggttgccgtgaagatgcagggagaaatcctgggggacagcgagggatgctgggtcctggggcatctgcctgttccgtcctctcctgatttgccaggtatcctagcaacgctgctgccagttgcctagcaaccaggtccccactcatggagaaggtgctcggagcagggtctgagctgtgtggggagaggtctggttttcctgcaaagctcgtgcaggaagtacaaccccatgaccgggagggagctggtgattcagctcaggggtcacccacacagccttgacctgtgacctttcatctcagtggatcaggcatgggacccccgtgctgagaaggaggcaactctgaaggggccattcagctgtgtgggtgccaggggcctgtctgcaggagtgatgctcagccactgatctggggcccagctgtggcagaggtgccctgggcactgatctggggcccagctgtggcagaggtgccctgggcactgatctggggcccagctgtggcagaggtgccctgggcactgatctggggcccagctgtggcagaggtgccctgggcactgatctggggcccagctgtggcaggggtgccctgggcactgatctggggcccagctgtggcagaggtgccctgggcactgatctggggcccagctgtggcaggggtgccctgggcactgatctggggcccagctgtggcagaggtgccctgggcactgatctggggcccagctgtggcagaggtgccctgggcactgatctggggcccagctgtggcagaggtgccctgggcactgatctggggcccagctgtggcagaggtgccctgggcactgatctggggcccagctgtggcagaggtgccctgggcactgatctggggcccagctgtggcagaggtgccctgggcactgatctggggcccagctgtggcaggggtgccctgggcactgatctggggcccagctgtggcagaggtgccctgggcactgatctggggcccagctgtggcagaggtgccctgggcgtgtctccaagtgacgaacagacccgggtttcaccccgtctctgccactgtgacaggtggcctcacacctctgaggcttcgtgctctcagcagtggccgggtatggtgggggtgactgagctccaggagcacacagcaggtgctgggccagtgccgtgtcctggacccaagcatcttacccgcttgtttacgacgaagctttgatctgtcgagagctggccgggtgggggcatttcggtgtgccgggagcccagctggggggtccgggccagtctgtccaaggctgtgtctccgtgtgagtcgtggtccccgtgtctgtgtgtccttgtgtgtgtctctctgtcctgtgtctccaatcctgtgtctgtgaacccgtgggcatctctgtccgtgtgtcctggcctgtgcgtgtgtgtctgtctggggtctgtgggtctgagcctcctttttcatctctgtgtgtcctggactgtgtgtctgtccccgtccagtgtggggccggcgcagccctgggtgcggtgacccaccttcccgcagcccccacctcctccagcctgcatagcccctccccttctggagctgcagcctcctccccctcccccccagcttcgggctgccggctcactcggctgctgcgtctggtctggcgtctgctgagaagatcctcttctaccctgctctgcacctgtgctcgactgccagccggctgagggcgggggtctccacggtggtcccagctcccaaggaggttgcagaagtaagggcctgagccgctggaggtcgggtgggggtcctgctgacagactgcagcaaagcagggcgggtggagggggcaggaggaagctgggtcccaggcgtttctgggtgtgtctcagtctcttttgtgcctgcgtgtgcgtgagggcaggtttgggcatttctgtgtgtctgtgtgtgtgacttgtgtccctgcatccctgtgcctgtgaacacgcgagtggctgtgtgttcatcagtccctgtgggtggacacgtgtcctggggtgtagctgcctccaggcaccctgtgtgtgagtctctaaaccaaatgggaccgtgtccttgcgggtgcatgtgtgtctttgtgttctgtgagtccctgtctgtgcacacgtgtcctcgtgtctccatgtgtccctgcatgtgcatgtgtgcctgtgtgttctggtgtgtgtgcccgtgtgcctcagtgtctgtggctgcccagcgtgggggtccatgtgcctgctgggctgcacgtgctgggttgtgaggcctccgctgggcgtgtgtctggcactgcagccacttgtctctgcgctctgtcccaggtaccgtacagagtggatttgcagggcagtggcatggagcccctcttccccgcgccgttctgggaggttatctacggcagccaccttcagggcaacctgtccctcctgagccccaaccacagtctgctgcccccgcatctgctgctcaatgccagccacggcgccttcctgcccctcgggctcaaggtcaccatcgtggggctctacctggccgtgtgtgtcggagggctcctggggaactgccttgtcatgtacgtcatcctcaggtaggctgggccccaaggttcctgtctggtgagtcccacacggctgcagagggggaaactgagacggggtctgttctggatgggcctgagcaggtgttgatttcctgcttcccccattcaatgtttttgaccctgtccaggaggcagggtcagtcctgaggccctgggtgctcccctccacagggaggggaggggagggggctggccctggcccaccgcgctctgtcccaggcagagacgtcaccaccctgacctctggtttgagctgtggaccaggctctgtgtcaagctgtctgcttgaatgacctcatgagatcccacagcggccctgggagagtcttttttcagcccattccctagatgggcgaagggaggcgcaggggctggagctcggaccgttctgaaacccctctcaggctccagggctcctgctcatggcaggtgtctgtggctgagcccatgatctgttggtgctcagagatgggaaaacttgtgggggccattgagagagcagctgatagttgagattgagggggcagtgtgggggcagtgtgtggggggcggtgtgtgggcagtgggtgggggtcagtgtgtggcagtgtgtggggggcagtgtgggggcagtgtgggggtcagtgtgggggtcagtgtgggggcagtgtgggggtcagtgtgggggcagtgtggggggggcagtgtgggggcagtgtgtgcgcagtgtgggggcagtgtgtgggggcagtgtgggggcagtgtgtggggcagtgtgggggcagtgtgggggcagtgtgtgggtcagtgtgtgcgcagtgtgggggtcagtgtgggggcagtgtgggggtcagtgtgggggtcagtgtgggggcagtgtggggggggcagtgtgggggcagtgtgtggggacagtgtgggggcagtgtggggtcagtgtgggggtcagtgtgggggcagtgtgggggggggcagtgtgggggcagtgtgtggggacagtgtgggggcagtgtggggtcagtgtgggggtcagtgtggggtcagtgtgggggcagtgtgggggggcagtgtgtgggtcagtgtgggggcagtgtgggggcagtgtgtgggtcagtgtgggggcagagtgggggcagtgtggggggcagtgtggggggcagtgtggggggcagtgtgggggcagtgtgggggcagtgtggggggcagtgtgtgggtcagtgtgcgggcagtgtgtgggggtcagtgtggggggcagtgtgggggcagtgtggggggcagtgtggggggcagtgtgggggcagtgtgtgggtcagtgtgggggcagtgtgtgggtcagtgtggggggcagtgtggggggcagtgtgggggtcagtgtgggggcagtgtgggggcagtgtgtgggtcagtgtgggggcagtgtgggggcagtgtgggggcagtgtgtgggtcagtgtgcgggcagtgtgtggggggcagtgtggggggcagtgtgggggcagtgtgggggcagtgtgtgggtcagtgtgggggcagtgtggggggcagtgtggggggcagtgtgggggtcagtgtgggggcagtgtgggggtcagtgtgggggcagtgtgtggggggcagtgtgggggcagtgtgtgggggcagtgtgtgggtcagtgtgcgggcagtgtgtggggggggacagtggggagcagccagggacataacgggggacagcgtggggggatagtgttagggacagtgggggcagccagaggaatagcagggggatagtgtgggggacagtggggagcacccagggggatagcgtggggggatagcatggggggacagtgggggtggccagaggaatagcggggggatagtgtgggggagatggtgtgggggggatagtgtcggggagatcgtctggggggatagcgtgggggagatggtgtgggggggatatcgtgggggagatggtgtgggggggatagcatgggggagatggtgtgggggggatagcgtgggggagatcgtctggggggatagtgtcggggagatggtgtgggggggatagcgtggggagatggtatggggggatagtgtggggatagttggggggagctggggcgatagcggggagatagcatcggggggatagtgtgggggatagtggggggatagtgtgggggagatggtgtggggggagatggtgtggggggatagcgtgggggagatcgtctagggggatagcgtgggggagatggtgtggggtggatagtgtgggggatagttggggggagctggggggatagtggggggatagcatcggggggatagtgtgggggggatagtgtgggggatagtggggggatagtgtgggggagatggtgttgggggagatggtgtggggtggatagtcgggggggagccgggggatagcattggggacagcatgggcacagcatggggggcagcgtgggggtgggcaaggaacccttcacgtggattgtggattgggcaggtagaagatggagatgacttaagcagaaagggagggttttctgggcagaggaaatgatggacctcaaatctatccagagaagagagaactgaaggggctggggacagcaggtgggatcttgaaggcccggttgggggaactctgttcttcaggcagtggggggttatgggtggtgctttagcaggaaaatgactgacagctggaatgaggtttcttattggtccaggatgtttgcctggacccggaaaaaggtgattctgaagaaagtgcccagggatctaaagcaagtgttccctccttacaacctcaaagggccccaaccggaggtgttatgtaggtagaggcgggacagggtagtgggggtgttcaagctgccaccatcctagccctgtcctcttagtgtccctgagaaaagctgttcccctctgggccttgtttttcccatctggaaagtgagcaaggtggaccatgcagccacgtgtatatgtatgtgtgtgtacatgtgtgtgcaggtgatgcgtggtcagacgagacagtgggaagaacagctgtccctccccactgctgactcctaagggaggctcctggggaggttgcctcgtgatgtgcatgtcccattgtggctggcgggcgtgtcacggctgaggagtgcggcagcctggggaagtccctgggcttgagcacctttcctgatatgatcgcttctctactgtgtttctcctctgcattgaggcatttaatctctcagaggcacttcctggattagagcagacagggaaggtcctctgctggccagagtccccagagagagcaatgctcaggagctgccgtggccacactggcccgagaggccgcatgcagcatgtttccagccagtgggctggggtgaccatcttgggagtcaggacactccgttctgagccctgctctgctttttaccagctctaaggccttaaaaaaacaacatagatcctcttggcctcagtttcttcctctatagagtggggatcaaagtagtatttttgcaaatcttcaatgacataaattccccctgaagagcttggcacaggtatttgccatgatcattgtcattgttgttgtctcttcgtaattgcggcctctttgtgcttattcataatccctctctaacaggcagaatggagccccatatttcctcacggcagctacactgacacagaatagtgtcatcttgggtgctgctgccactgccaatatcgccgccaccatcatcatcacaatcatcaccatcaccaccatcatcaccactatcatcatcaccactatcaccaccaccagcaccttcattatcacattcaccatcctcaccatcctcaccaccaccatcaccaccatcatcaccatcatcatcatgaccatcaccaccatcaccactatcaccaccaccaccatcattaccatcatcatcacgaccatcaccaccatcatcaccatcaccactatcaccaccaccaccatcattaccatcatcatcacgaccatcaccaccatcatcaccatcaccactatcaccaccaccaccatcatcaccatcaccatcatcacagtcatcaccatcatcaccatcatcatcatcaccactaccatcacgctcacagtcatcaccatcaccaccatgatcactgccatcatcaccaccaccatcaccaccataatcccccccaactattacaaccattaacttatttaacaaaaatttattaatcaccaacgattttcccagccctttccagcaccatttcaggtgcttggatacactcataccttattagcatccctcctgtccccccgtcaccattttcggtctccattgctaggcagcagtgtggacttggaagccttttgatatgttcttacagattctggagccctcagaaacctctggcaactgtagggtcagcatttgagtctgtgaggggtcatggaggggactcaaaagcaaggggagcagactctttcccttagggctctaaacctttgctcctgtgcagaatccggggtgtgttctggtagcctacatgccctgactcctctaaagtagacctgtgtttaaggcttggaatccttctgtgtgtgtcagagtcacttgaggagctggttaagacgtttgaccccaggccctaccccctgagactgactcatgagtctcaggttgggtccaggagctatcacttaccaagcccccatgggaactctgatgttaagggactcagggccactgtagcttgtggtggccaagaggagccccttgccctttgctgcctggtccagccagcatggccaagtgaagcctttcttctccctctactccgcaggcacaccaaaatgaagacagccaccaatatttacatctttaacctggccctggccgacactctggtcctgctgacgctgcccttccagggcacggacatcctcctgggcttctggccgtttgggaatgcgctgtgcaagacagtcattgccattgactactacaacatgttcaccagcaccttcaccctaactgccatgagtgtggatcgctatgtagccatctgccaccccatccgtgccctcgacgtccgcacgtccagcaaagcccaggctgtcaatgtggccatctgggccctggcctctgttgtcggtgttcccgttgccatcatgggctcggcacaggtcgaggatgaaggtcagtggggtgtcccctcctcccctcaccaggctccctggctcccgggtggctcctctgggcccacgtgccctccacgtctcctgggcccactctgaccccgtttctctccctgcagagatcgagtgcctggtggagatccctacccctcaggattactggggcccggtgtttgccatctgcatcttcctcttctccttcatcgtccccgtgctcgtcatctctgtctgctacagcctcatgatccggcggctccgtggagtccgcctgctctcgggctcccgagagaaggaccggaacctgcggcgcatcactcggctggtgctggtggtagtggctgtgttcgtgggctgctggacgcctgtccaggtcttcgtgctggcccaagggctgggggttcagccgagcagcgagactgccgtggccattctgcgcttctgcacggccctgggctacgtcaacagctgcctcaaccccatcctctacgccttcctggatgagaacttcaaggcctgcttccgcaagttctgctgtgcatctgccctgcgccgggacgtgcaggtgtctgaccgcgtgcgcagcattgccaaggacgtggccctggcctgcaagacctctgagacggtaccgcggcccgcatgactaggcgtggacctgcccatggtgcctgtcagcccgcagagcccatctacgcccaacacagagctcacacaggtcactgctctctaggcggacacaccctgggccctgagcatccagagcctgggatgggcttttccctgtgggccagggatgctcggtcccagaggaggacctagtgacatcatgggacaggtcaaagcattagggccacctccatggccccagacagactaaagctgccctcctggtgcagggccgaggggacacaaggacctacctggaagcagctgacatgctggtggacggccgtgactggagcccgtgcccctccctccccgtgcttcatgtgactcttggcctctctgctgctgcgttggcagaaccctgggtgggcaggcacccggaggaggagcagcagctgtgtcatcctgtgccccccatgtgctgtgtgctgtttgcatggcagggctccagctgccttcagccctgtgacgtctcctcagggcagctggacaggcttggcactgcccgggaagtgcagcaggcagcttttctttggggtgggacttgccctgagcttggagctgccacctggaggacttgcctgttccgactccacctgtgcagccggggccaccccaggagaaagtgtccaggtgggggctggcagtccctggctgcagaccccgagctggccctgggccagccgcacctctgaaggttttctgtgtgctgcacggtgcaggcctcatccctgactgcagcttgactctgggcccaacccccatttcccttcaggagaccagcgagaggccctggcccattccctccagcggtgcaatgaactatcatgctgtggaccgtcaacccagccctgcttctcagtgtggggcaggtgtctcaggacgaaggcgccgcgtgaccacatgggcagctctgttcacaaagtggaggcctcgttttcctggtcttgactgctctgtttgggtgggagaagattctctgggggtccccacatcctcccaaggctcccctcacagcctctcctttgcttgaagccagaggtcagtggccgtgctgtgttgcgggggaagctgtgtggaaggagaagctggtggccacagcagagtcctgctctggggacgcctgcttcatttacaagcctcaagatggctctgtgtagggcctgagcttgctgcccaacgggaggatggcttcacagcagagccagcatgaggggtggggcctggcagggcttgcttgagccaaactgcaaaggctgtggtggctgtgaggacactgcgggggttggggggggggcgtctgtacctcaggggatgccccgctgtggtcacccagagaatcacccttcctggtctacagatggaagctgcaggttggtgactttgcaaatgcacttcctacagatgaactattaaaagacctgcaacattgaaaaaactcattttttccaccaaaaccttggccaggtaacctaccttaggcacctgcaaagaacaggaagtgatggctgtctcgcaacagagcctgggctgctcctcctgctctggggagtctaggccgtggggactgttctggggaggctcatgctgtctccatgacgtctgtggcaggagtccctgaggacgggagctgcctagctacagttttcttgccaaggcgaggtgttttgtgaatctgtgctgatgtaatgtgcaccttcacgtatttatgcatgtggcaagcgttacttcctgtgcacgtagccagccctgggtctgtctctggggtaatgaaaaaggaccctaataaacacctgctcactggctgggtattctttgtaaccagtgtttctggctcctgccacctggggatttgcttctggagtgacttttctgggattggcacgtgggtgggaggaggctatgggtttaggctgaattcttgtacctgtcctgtgctgctcaacaggctgggctctgccctcagtgaaacgtcccccaggaggctgcaaccctggggagagttgaagccagttaatggtgtgttggccgggctgttaccttttcttcagcacacacggtttctctctaaacaaccgatggctgcacctctcccctgccccctggaaagagaggtttcctgaggatacagtgggagggtgctgctcccacccaggttgcagggttttcttacccccatttcatctcagaagaacccctgctcctgctcatttccccttccttgagcagatctgaggggagttttggtgaaggatgagcagacggcctcctctagggctgggtacactcttgccatggacatctgcctcctggttcctgtttggcccagttcagcccaggccgacctgcaaaacagagcagctttggagggtgggcacgggcacactccagtccaagtactcgtctccagggcatgggcagatgggcaagttctgtaggattttctgtaggtttgaatgacagacactgtcttatcctggactgctatagcaaagtaccatagactcagtggcaatagagacatcagatgtttatttctcatggttctggaggctggagatctgagatcaggtgcaggcacggtcaggttccggggaagacccgctcccaggctgcagagggccatcttctcactatgtcatgacatgggtttgacagctggagagcgtgcctttcctaaaggcactcatcccattcaggagggctctgccgtcatgacctgtcatctcccaaaggcccccctctcctgataccatcagcttggggggctgagatttcaaaatgcaaattttggaggaacacaaatagttcataacaaacacattgccatcaaagcaaaaatatagcatcaagggacaatttgggagggagaggctgcaccggggcagttactgtgcccttgggcccgggagatggtatggtcttggtagaggaggctcacacatggtgcggactgtcctgtcttcgggtgggtgtggatccagggctaagcccacagctagtgtcttccagaaggagctggccagacaggggccaagggccgtaggaggagttggggggcgttggaagctgactagctcccttgccctccaggactgggttccaccccggcccactccacccctcctctgaccgcaccctgggtctcctctccagcccccggctcccccagcccacctctgctgtcgggcttggtcaagtcgcctggcttttctgagcctcggtttccttccgtgtgcaaaggggaccgcagaaccctctttgtggggttgtgggggaaggctggggcgcccgggagggtcccgggtcgcgtccgacctcaggaaggcggggcttcagcagcggcctcggaccctccctccagggggcgctgtgggctcacgcgggcccagccttgggccccggggcgctgcggcgggaaccgcggtgactagcggggtcttaaagcgggtggcggggccgggctctcctgggaccaggagcccagagcgtggagacgtggcgggctgagccgctcagtgcggcccctgccccgcgcccaccccgccccgtgtcaggaggtccgcggagcgggaggacccgcctcccggggagagctcgcccgcccctccctcccggctggccgcggggcggtctgcagaccctttggccgtgccggatctgcctggtccccggggagaagacgctgaggatcccattgctggtctgtggatggggacaggagacgcccgaggtaagaaggggtccgggttctttggaggaatcctggttggcgccttctctgcagcagagacgcccggctggggccggagggcaaactgggggcagggtgggagacctcggccctgagggctgtaggggctcttgcctgggcgctccttaagctcccccgccccctccgccccccaccccgcggtgctcactctcagtcctgccttgcgcacattcccacgcccgggcctctcctgcccgcccctcgttgttcacttgctcattacgcctcacacctggctctgccgcgggcttggagcgggtgtctgggaaacacagtctcacttgtctcctcaaggggctccggggcaccgtaacagcgtgcagagcgcagtcaggctgccgtgctgctgctttgcgaggtgtgactgcagcgcagccaggaaacaaatccagggacagcttgttcttcctgcggtgtcggtgttggtggtggcttaaaaattgcccacagactgggctcatgcctgtaatcccagcactttgggaggctgaggcaggaggatcacttgagcccaggagtttgagaccagcctgggcaacatagtgagaccccgtctttcaaaaaaaagaaaaatttgcctggcgtggtggcgcacgcatgtagtcccagctactccagagcctgatgtggggggattgcttgagctcaggaagtcgaagctgcagtgagccgtgaccccaccacagcactccagcctgggcagcagagtgagatcccttctcaattaaaaaaaaaaaaattgaagcaaaagaaaaataaaccgtctacagcccccgagtgtgggctggacatgtgacttgcttccaatgcacagaatgtagtagaagggaaggcaagtggcttcggaatcttggcctcaaatgtattgaggcttcctcttggctcccccctgggtcgctggctcctccctgggtcgctggctcctccctgggtcgctggctctgggggacccagtgccatgtttcgaggacactcagcccctgaagcatccatgtgttgaggagcagaggcctcctgcccatagccatggaaggaagacttctcagaagaagataccccagcccctgcccagccttcagagggtcagggcctgggccaaggtcctgactgcaacctcaggagagaccctgagccagaaccacccaaaaagccactttaattcttgaaccacagaagtgaaatagtagaagttgtcttaagcggctaagttttggagaaatttgttattcagcaacagatatctaatacaatgttgtcagggaggataagtggatggagatggccgtggcgtgtttggctggctagcacggaggaggggcactgctgcaggcctgagccgagtgggctggaacgctggagtatttggtggatgggtggaggtgggcatacaccctgggacacctcgtggggcggtgaatggtgggtcctgtgtgccggctggacagattgatcagagctctgggtcatgaggactgaaaccaacccagaacactcacacctcactgccaggctggaatgccaggcatggaaccagctgagagccatggggccaagagtcggggcctggccacagcacacctgggaccaacccctggcccctcccacctgacagtcagcggtctctgaactgcctgcatttcattaccacccctcaccctgcccccaccagagtttcagcatgcagctcctgctggctgattacaagcccctggccacaccccgggagagagagttccaggtgccagcctgtccaagtgatggatggtccctaggctgtggtggcccagaggtcctggcaaaagggccctgtagcctctagtaaagtatgagaggagcatcggccacagcaggggtgtacaggccatggcgaggaccgtcggccacagcaggggggtacaggggagcacaggccatggagaggaccgtcagacacagcaggggggcacaggggagcacaggccatggtgaggactgtcggccacagcaggggagcacaggccatggagaggaccgtcggccacagcaggggagtataggggagcacaggccatggagaggaccgtcagacacagcaggggggtacaggggagcacaggccatggagaggaccgtcggccacagcaggggagtataggggagcacaggccatggtgaggactgtcggccacagcaggggggcacaggggagcacaggccatggtgaggactgtcggccacagcaggggggtacaggggagcacaggccatggagaggaccgtcggacacagcaggggggcacaggggagcacaggccatggagaggactgtcggacacagcagggcgggtacaggccatggcaaggaccgtcggccacagcagggggaacacagcagcacaggccatggcacatgggcacggcggggctgggcctcctgctggaactccacttgggcttcaggccacgagagtggatttctgggtctcatgcggtgcaggtgtccgcctttgcagcaacacagcatcgctgctgcctgaggtgcccgcacttaccaccccccggccccatcttggggagagactatgtaacgtggcccaggtcaagatcacagttcaggttccctcccctcccgaccactgtcattagggatcctgagtcccagagccttccaaggggcttgtccatctgtctgtctctcgtgggtaagtgggcccgggatgcttgctgtgtgggggcctctgccaggacctggatccctgctgctgtccacccaggggctgtccaggaagcagagacatgggaggtatatgcccacggctgtctgtaggtctggtggccagcgtgtgagggtctgtgtctccttgcgtggagaggacagcactgggatgtgaacaggccgggcgtcccctgaaagagacagccggaactgggtgggggtgggcgtgatgatgggggtgatggtgggggtggtggggggggtgggcgtgatgatgggggtgggggtgggggtgggggtgatggtgggcgtgatggtgggggtgggggtgatgggggtgggcgtgatggtggatgtgatgggggtgggcatgatgatgggcgtgatgatgggggtggtggtgggggtgatggtgggggtggtggtgggggtgggggggggtgggcctgatgggggtgtgggcatgatgatgatgggcgtgatgatgatggggggtgatgatgggcatgatgatgggggtgatggtgcccaggcccttcagcaccgcaatatgctgcggaagttcttccggaagttgtcatctagaaaggcgtagaggaaggggttcaggcacgagttggcgtagctgaggctggtgatgacgtaggacatactgatgaccagtggggtctggggcaggtccgtggtcagggccacgacagaggccaggtggaagggcgtccagcagaggaggcacacggccagcacgacgaggaccaggacggtcaccttccgcctggccttgcctagagccttggctccagagcggagccgcacggcccgcagcctgcgcaggaggtctgtgtagagcacacagatggtgcacacgggcagcacgaagcccaggaccaacgtgtagacacggctggccttgaaccagacctgctcgggccacgggaagctcagcccacagcttgggacctgcagctcgttgctgtagacgccagcgaaagagaagaagggcagaaccaggaccgtgacgcccagccagacacacaggctggcgaccttcgccccccggtaggtgcgccagggcatgtggcgggacctcacggtggccagcaccaccaggtatcggtccacgctcatcacggctaggaagtagatgctggagaagatgttgtagtggtcgacggccagcaccagcttgcagagcagctccccgaagggccagtactgcagcaggtgctccgcgatgttgacgggcagtaccagcgtgaagagcccgtcggcgacggccaggttcaggatgaacacgttggtcaccgtcttcatcttgggcgcccttaggattacaaggatgacggccgtgttgccagtcagccccacagcacagatcccggagtacacggcgggcaggagcacatagaggaacggcagtggctcggagaaggtggcattgtggccagtgccattgtcctgagagacgttggcacccatcgtggggagggagaaggagcccctgctgtcaaggggctctgggtgcccagcggcctgcattgtagctgggaccgttgacgatttgcgccctgggcaggtgggaggtgccttggagttgggtatctggttgggggcctccttgggctggattctaggaaagaaaaacaaccagagactttgagatccggccgtctgttagggcacagccactccaggttctctggcagagactgcggccactttgccaggtcaaggacatggggccagagggagcctggtggggtgtgtgggggcctcctcccgcctcttcctggtgagacttcagcagatcagttccctcctcccgcagagagcagctgctggccaccctcctgggaagagatgtggatccgtccctgccccagcaacccgcagatgcacgggctgcgtagaatcaagcggtccctttggaaacacacctcccaagctcatctctggctcccttgaatctgaaggtccttccctcaggggtcttggagtctgcaccctccctcacaccctcccgagagatgctgcagaccctgctggtccagctactcttctctccactgacctgtccagtgcttcgagtccagaagttggtagccttggtgtgttcctggttttggccagtacaggcagtcgcagggatggagggcgaggtgtggtcctcactgacagacctccagctgaggtttcaggagtttcaagacctgccctgctggctgcctcagccccggctgcgaggttcccagcctggtgtcagtgctgatgctggtgagggagggaggcggatcccccttgctgacgtggagcccggaaggcaggccccaccttcccctgagctgcagtagcgcctgcagtcggctgtcccagggtctcctcagcattcacttacccaggcagactcctcagtgggcggctgaggcacgtgtgcgcctgtgtgtcaggaagggactccatgcaggggcctctgggtgtgcccaggtcttcgggcagagggcactgaaggcatctgtgcctctgtccgggagtcactgtgggcctgggcacccttatctgtgaacatgggtgtcttggtgggtctcctgccccaccctgtgtgtgtacatggtgtgttcctgtgtgtgtgtgccagttaggacatgtacgtgtgtgggcctgtgtctgcctgtatgggggtctctgtgggtgagctctgcgttgtatctgagtgggtctacatgtccttggctgagtgtgggcatctggggggtctgtatgccctcatgtggaagcagaacttgttggccataggcaacccaccttctttttttgtcttttgctaaaagaggaactcagcctaggcaagctgtgaaaggctgcagagaagacgttctcacgctgacacgtaactctcccgccgtcctgcagaggtggtgagcatcacactctgctctgggttggtctttaagtccttcccttctccctgcttttcttccttgctggacgcaccctggcttatccaacccgtgtgtgtgcagctcggccgcatctggacctgctttgcaggcaacgccacagctgacacgagcagtcgccagtctcagagccgctcctcagcggagacgtgttgggtcagagggtctgtgttttctttcctttcttcttttttgagacagggtcttgccctgtcacccaggctggggtgcagtggcactatcatggctcactgcagccctgacctccctgggctcaggtgatcctcccacctcagcctctcaagtagctgggactacaggcatgtgccaccatgcctggctaatttttgtgtttttttttgtagagacggggtttcaccatgttgcccaggctggtctcgatctcctgagcttcagcctctacctcagcctcccaaagtgctcaggttatagccatgacccaccgtgcctggtcactgtgtgttttcagtctggggagatgtgtctgcccatcgagactgtgcccgctgcctgtggggttgcaaggatgtcaccgcacactcatggtcggccttctttcctgagagttgctctgtcaagtctattggttaggacaggagcctgggcagtcgccctgagtaccctgatgtcgccagcctgagggtacactgtgggtgggccccgagctacccttctatgggctgtgccatgtggatgttgagtccggggtcagggaaccctgctgagatatctcacactcctcttcagccagtttggggatggcggtgggggggatctgtgggtgtgtctcgagggagcgtggggcttgtagccacagtttgtcacataagtggagcttgacgcccacaaggtcaggggatggtgattagcagccgtgaggagagggtgcattggggctgaattttgtgatttggggtgttcgtggggtcgggaggggtcagttcacagctcctggaaaccagaggcgtgacacagagaggccaggcctggcatgtggtggcccaggcattgaccagggtgtgggctgggccaggcggtcactggtcttggctggggagcggccgaccatggcctcagcaccgggcactgggagaatgtcccaggcctgctgtcaccgagctgctgtcctggggtggggctggccacgctggcctgattctgggcctccctgggggcctgctgtcaccgagctgctgtcctggggtggggctggccacactgcctgactctgggcctccctgggggcattgctgggggcctctcccttccatgcattttgggaggggcccaggctagtgccggtgccttcctctgccccccagggctggctggcagcctgcccagtgacccccgtgtggcctgagctctgggcacccctgctggtctttgccctgcaggataccgactgccacccacaccttcttcagagcagggtgttccaggagggtcttcccttaagcctcagtagtggggagcccagtgtcagaggcatccctcagagcacagaatcttcccatgcaaagatcccactgtgtgtctggcttcctctgaagccaaccacgagtctgggtcctcttccctccaccggtatctggtgagtctgggaatcggagcccctcccagactctagctctgctctcctgagcctgtcctgaaggctggtctggcaccaccgcccgccggtcacattggaggtggggtgcgcatgatggaagggatggggaccctgagggcagtggggatgggggagactgccaggtgctgagctcaggaccccggggaggccggctggaggtgtcaggtcctcctggccacaaaagcagcagccccaggggccttttcctcctcccagaagcacctcaccgatgcccgctgcaacaccagggcctgagccgggggtgctcccccgtctgtacccccagcactcagggctcagaaaggccctttgctctgttcgtgggctgggcattgttccagccagctgtgagcttgtgagagcatcgttctgtggaaatggtttccattttcagaaataaattggccttttcaaatgaacctgtgaggccctttgggtgaagagaggagaggccagggagggagggagccgtggtcagctctgttgggcagaacggtggtgggggcctgacagcaaggccactgacatggcacatcctctgtctggggtgtggggtgagggagtgatgggtgccagtcagtgtgcatctgagcattttgtggggctgcgtgtgggggtcttgcagggacctgaaggagacccctagggcaggggccagggagaagcgccaggaccctgggacagcctgagcaacacacaacatagctgtgctggcttcacgcttgttgccgcttcacataggtgtggcagctgccctccacctgtccccctgtgtgcagggacacctgtccctcagtccgtgctgcgacttggatcttcacacgggcatgcatatgtgtagcaggcatacagacccagagattcatacagactccagtgtgcttgttgaccatctcatctccagccaggcaggccctggtaggaggggtggattctgccctgtggccagagtccaggcctgtctgccctgctctctctcctccatcagctctccaagatgagcctcaactgtagctgtggccctgcaggttaagtcctcccaagaggcctaggccattaagaccagtgagagggccgggggcggtggctcatacctgtagtcccagcactttgggagaccaaggtgggcagattgcttgagcccaggagttcgagaccagtcaaggcaacatggtgaaacctcatctctacaaaaaaaatacaaaaggccgggtgcggtggctcacgcctgtaatcccaggactttgggaggccgacgtgggcagatcacctgaggtcaggagttcaagaccagcctggccaacatggcgaaaccccgtctgtactaaaaatacaaaaattagccgggcgtcatggtgggtgcctgtaatcccagctactcgggaggctgaggcaggaaaatttcttggacctgggaggcggaggttgcattgagccgagatcatgccactgcactgcagcctgggggacagagcgagactctgtctcaaaaaaaacagaaaaacaaacattagctgggtatggtggtgcatgcctatagtcccagctgcttgaaaggctgaggtgggagaatcgcttgagcccaggaggtcaagactgcagtgagccgagatcgtgccactgcactccagcctgggtgacggagtggggccctgtcacaaggaaaaaaaaaagaccagcgagagttccaggcctggtgttctctaagcaggtaattgggcagcttagctctctcgaaagagataagtaattcagggccagtttccctcagagtgggaggtgaattctccagggaagctgggagaaaacacactttatttataaaactgggaaggggccatttctcatttaaattcaggattccccaccatacctcggggcacccgctgcctctctctttccccgtccagtcagcaatgaactgtccccaggggaggtcatgttagacaggaccatagacaccgggcaccttagctcagggcaggtgagaggggccagggtagccagactgggtcctcagccacctcccaaatacccgaacttaggccctgagtcattcatctgctgcacaaacacttgcccaggaggactgcggtgagcacagggaacaattcctgctctcgtggggctggccctttggtgggggaagcagatggtagatgaaatagtgcagtgcactgtggagcaggaggaaggggagctctgggggcagcaggaggccactgggccttgcagagaaggcaacgcttgtgctgaaacccggagtgggtcggggaggctgggcgagtgggggcaaggcccctgggggaaagagggcccttgggaccaggtcctaaagccagaggttctggaggtgacagctgggggagcagaggcctgagcaggttggggaagtggctgttgcagggaagccggaggtcacggtggcgtgtaggtctgcctgcctgtgggcagcccccaccctgaccaaggccttctgcaagtaggggtttacagggctactggggctggggcaccgaggcctccctctcatctctgaacctcatctgctaaagctgtgcctgccctacccacatgcctcctgccgccccaggcgcgtgtaggcggcaggctcagggagcctggtgcaaagatcccatcgtgactgaagcacgcagacaggaaggagggcgactgttccctagggcccaggcctgtctcctcttggggctgggagggttgcttaaatcaattatcaaagcgcttgcagcctcctgctcactcacaaagacccgaatccaagcacaggacagcaggcccccaggacagtcttccccagtggtgactgctccctgttctccttgccttgtccagtcccaggccctaataaccaggcataggccctggaatgggcccgccctgagtttggaagcttccaggtgctctctggaggcacaatcccagagggcttcactgaggaggtgtcactgtgcctggcctcagggccgtgtccctgggtgatctcagtgtgtctggagatgtaggagagggctggagggggtctcactctgtcctcagggctgggagcagctgtggccactcggagatcgtgggcagagtgggcaggcaggtgcaggcgcctttgagtctccaggggagggggttattcaggtgtgtcagtgcgtgtggacacacatgtggctgggcgggagtgtgtgtatgtcctgtgacatccttcaccggtgcctgcagtggcagagcgccctgagcccccatagagggcccaggagtgtccgagacctgacgtggactatgtctggctttctcgtcaggccgtgaattcttgctgaaggatcctcagatgggaaaggctgatgcatgcccagatctggaggcttttgactcgcctgttggctcctggcctggagacaaccctgtaggccggcagtccgtgtccctccacaggaggaccgtgcctacgtggctggtttctgggcctggggagtatgggctgcagctctgggatgctccaggggctagatttgttgaccttggaccgggctctccgtcgtgggcagatgaggaggggtgggaaggttggaggagaaaggctgggtgaggcagcccccaccaccctttctggatctctcaccttggggacatccagacaggagagaacagatccaggctggcagctggtagggtcggaatgatgggccctgttggaggtgagggagcttctgaccttgcccattctcttccccttctaacctgcctggcacaaaccccgacctcaaaggatggatagtggcctgagcctgtggcagaagcttcagctacccccggggactggctgatcctcgtgctgtgactgcagtacacacacacacacgcacatacacacctgctcacagattccagcacacacagaccttagcacacacatacacacaagcacacagatgccagcacgtacacacctgccctcccacacatggtcacacgcttacactccattgttgcatgaccttctccagatcagcacctgccatgtcctgcctgccaggtcgtcttcaggccaggagccattgcttgtgggtggtggggtggggctctcttgagctgattgctgtgagacgaactgggctggggaaggctgggtggcggtgtgggaccaggccctgctggagaggggtcaggggtggggtggaatgttagagttaggggcagtggccgggtcagggtcagagtcccacagccacatgcttgctgccctgcatccttgcagcattggcgtcggtgcacacgcatgtttcattccccgtgttcatggcatccagcccccatgtgtcatgttcacatgccctgtctcatttgctcatgcaaggctaacatcgttgtacccacacacgtctgcatgcatgactcgatgcacttttgggccccacttcaggcttcatgtgctggctgcacacattcctgctcacacgtcccgtggacatgccctgagtctctctgataaggttcagagcccaggagggcacctctcactcgggggagcctgttcctgaccctgttctctgctcgaggagcctcgggagggtcactgggcaagcatctaggaggagccagcagctgcagggctggaagggccatggcccacgcctttctgtggccagtgagcagggatcctgctgtgatgaaatctcaggcaggctgtggcacgggggatgccgaaggtgaatctgtgtagctgtgaggaccctgaagaagagctttgccgggcgggcagctggggcagtgctgggaggtggcacctggctggtgcatgttgtatcctctgtctccaaatccccgttctctgcacagagctagacattttgctgcaccggcgaggactggagtggagtcaccctcagctctggggaccccgctatgggccaactcctccctggacctcctgctgatgggctgccctggttcctatctccacccctttgctcccagcacctctgctggtccatgtaaccaatgtgccctgcatgccaggccctgggctcagtgctgggggctcagactgggctgggacctggcaggggttggggtggtacctctgtccagggcttgtggatgggactcttttgctactgccttggcagcagccaggagggggcccagctgaggactgcagctctacccagtccagaacgtttgaccatgcagggggataggctccacttccagagtctgtgatggttttttttttgtcagaggaactgagctagaaagagctgtgaatgatggttcagctctgagaagcagataaacctttataagtcagaaggggcctcagtttctccatttgtcctggccctgtttgtcacatgcccttcaggacacacacatctgtctctcctgcatagccctccatggagtcctgggccaggttccgggtccaccctgtccccatcccagtgtgctcagcccagggcagtaggccacatcacaccaggtcttcagtggcctccctcctccatccccagggatgtcgcagggatggcaggtggaggaggcttttaccaggagaggcagcactggcaggagcaggtttttaaagtcttgaggttgtcatagcaactgcatccctgctgaggttctgaggttcggtggctgtgcagacgtccatgtgctggagctgggcatgtacaaaagccacgtggtggctccaggctgctgctgtggcacaggtgtgccttggcgttggtgaggtgtggcacggctgtgcggtggcgcaggtgaggtgaggtgtgaggtggtatacgtggccttgcggggcagttttccttgcctgtgacctcagcctatatccagctccaaaatgtggtctgcagtggggaagggcaggagctggatctggccctcccctgtgctgacctagattctgcccggcctgcaggtcctgcagcagacgtgcctgtaatgagtctaattgtgcaggctctgtggtcaccatagctttcggtacccaagggggtagacagaggtttgaatctaggactgggcagctccctcaccttccacccccacaaccgtggcctcagtcatcaacggacgaggccaagtcagtagcggaagccgggccgtgccctcggctgggtcctgtggccttcgggctgccaccctgtgctggggatggaggtgggggcatggggctgctgccaacacccggctggtgcttgcagctgtggtgccaacaattctcacgccgcgctgtcgtctttttggcttctggaattttgagccaattcgggctcaccgggttgatgccgcccctcatctggccgaggcttctgggagcctgagggagtcgggaccccaccctcagcggggcatggcgtgggccacgtcaccatccgccttgtgtttatgggatgatttaaaagaacacggcagtcttggaagagtggtgatggcgtttagcttaatggcttttgatgcagaagccaaaagcgtggtctgggccagacctaggcagtcagggctctgggctgggcaagggcaccgtatgaaaggctgggtggggatcaaggggagccagggttcaggctggaggccccctgaagggagatgagggtctgcaggggctgtggcatgaggatcttcatggctgcagtcttggaggagagcaaagtccagacaagcctagggacgggacagaggaggtggacagaggtggacagaggtgtgggaggccggccacggcccactgcacagggggtcttggggacgccagctcagccccaggcctcagctgaatggttgcctcccgcccaggtcgggccccacttcttgtgcccagggccctctctaaactcttcatcatggcccctctccgcctccccccggactccaggccagcgctgtgtctgtgctgtgcgtcttttgagctttgtctccagccctggaccctggggctcctccttctcgggcctcttcctgaagcctgaggagccaccctctgctgggggaggctgagtgtccctgcctagtctgggtgaggggagtcacagcccggcccagaccccaccccgcttacatgtatggcaagccatggccttgctctccagaagccatggcagccgggtgaggatactgtgagcacaggacttggtgtccatcttggctgtgccctctcaggagcatcagcctggtgaccttgtgacctcttatgtcccctctgcaggaagggtgaccaacagtctggattggcccaggactgtccaggttttagcactgaatgccccacatcccaggaaatctcttggtcctggacacactgtttatcagtagggcctacccgggggacatatgagaaagtgttccctccaggagaagctgtgctgggcatgagggcactctgatgtgtgtgtgggtggcctgggcaaagctgtgcggggcatgagggcaccctgatgtgggggggggcctgggcaaagctgtgcggggcatgagggcaccctgatgttgggggggtgtctgggcaaagctgtgcagggcatgagggcaccctgatgtgacgggggggcctgggcaaagctgtgtggggcatgagggcaccctgatgttgggggcggtctctgggcaaagctgtgcggggcatgagggcaccctgattttgggggtgtgtctgggcaaagctgtgcagggcatgagggcaccctgatgtgggggggtgcctgggcaaagctgtgcggggcatgagggcaccctgatgttggggggggtctctgggcaaagctgtgcggggcatgagggcaccctgatgttgggggggtgtctgggcaaagctgtgcggggcatgagggcaccctgatgtggggggggttgtctgggcaaagctgtgcggggcatgagggcaccctgatgtgggggggtctctgggcaaagctgtgcggggcatgagggcaccgtgatgggggggtgtctgggcaaagctgtgcggggcatgagggcaccctgatgtggggggggtgtctgggcaaagctgtgcggggcatgagggcaccctgatgtggcgggggggggcctgggcgaagctgtgcggggcatgagggcaccctgatgttggggggggtgtctgggcaaagctgtgcggggcacgaggtcaccctgatgttgggggggggtgtctgggcaaagctgcgcggggcatgagggcacgctgatgtggcagggggtgtctgggcaaagctgcgcagggcatgagggcaccctgatgttggggggggtgtctgggcaaagctgtgcggggcatgaggtcaccctgatgttgggggggtgtctgggcaaagctgcgcggggcatgaggacaccctgatgtggggggggtgtcggggcaaagctgtgcggggcatgagggcaccctgatgttggggggggtgtctgggcaaagctgtgcggggcatgaggtcaccctgatgttgggggggtgtctgggcaaagctgtgcggggcatgagggcaccctgatgtgggggggggtgtctgggcaaagctgtgcggggcatgagggtaccctgatgttggggggggtgtctgggcaaagctgtgcggggcatgagggcaccctgatgttggggggtctgggcaaagctgtgcggggcatgagggcaccctgatgtggggggggtgtctgggcaaagctgtgcggggcatgagggcaccctgatgtgggggggtctgggcaaagctgtgcggggcatgagggcaccctgatgtggggggggtgtctgggcaaagctgtgcggggcatgagggtaccctgatgttggggggggtgtctgggcaaagctgcgcggggcatgagggcaccctgatgtggcgggggggggcgtgggcgaagctgtgcggggcatgagggcaccctgatgttggggggggtgtctgggcaaagctgcgcggggcatgagggcaccctgatgttgggggggggtgtctgggcaaagctgcgcgggtcatgagggcaccctgatatggtggggggtgtctgggcaaagctgtgcagggcatgagggcaccctgatgtggcgggggggcctgggcaaagctgtgcggggcatgagggcaccctgatgttggggggggtgtctgggcaaagctgtgcggagcatgagggcaccctgatgttgggggggtgtctgggcaaagctgtgcggggcatgagggcaccctgatgtgggggggggtgtctgggcaaagctgtgcggggcatgagggcaccctgatgtggtggggagggcctgggcaaagctgtgtggggcatgagggcaccctgatgtcgggaggggggcaggcctgggctcagccagaagacagccccagttcctccagcatggctgggccccatcccacctcacttccttccatctccacctttgccgactcctgggatctgagcctcctcctggtctgtctctggttctgaatgcctcctatgtgccgggtgctgacagctaaagatacatccgtgtttcattttgtctccacaatggccaggggcagtactactgtcatcccatctagcagatgggaacaggaggctctgatggagtttccctggagcgtgcttgctaaccgtggagcaacagggcactcagcttccgcacggagcttcccagagcctgtggcttcctctcagggctccggcagtgttgaatgtggggagctcacactctcaccagggagacctcatacctgctgcttatcacctgggagatgttttctgcccacagaggctccgtcacatctctggctgctcggggaggtgagtggggccctgctcactcaggacaaaggaggctgaggtggagctctaggcccctcttccccacccacttgagtgcaccccgaaggcacgtggagttcctggggtgctgcctgtggtcgggccagagactgctccactgtccaaactgtgctcataggtatgtggcctggggactgttgccgtggaaccgggtaaagagccctgtggacctgtgctcccaactcaggccagtcaagggtgccactgtggcctagatagtctcctgaggggagcagaccaggtggaggtcaggagtacaggtctgggactggctttttccttgctgtgtggcccagggtgagttacccaacctctctgagcctctgtctcctcacttgtcaaatggggatcgtaattttcctgcctcaggctggaggcttgcacgtgttgggccagccccatctgaggtcccacctgcccgtgctgctctggacctggtctggggtttcggccttgggcctgggcagctcaggtggatgcttggagggagcactgacctcaagtcagctgtgagtaggacgggaggctggtgagcggcagcaagctgcaagccacaggcagggagaacttcccggaggtagagagagagagagagagagagagagagagagtgtgtgtgtgtgtgtgtgtgtgtgtgtgtgtgtgtgcgcccttcttagcctgggcaaagaattgggagaccagcaggccagcgctggctctgccatggaggggaagcactttgaagccccactgttcctggactagctctgctgaaccacagaggggccgccgttttcccttggctggggtagaggaacagggtccttcctgtggctcctggctgagccaggttctgtgcgacgcggaccaaccctgacccccagtggccagttccgagaactgctgcagaggaaaagggaccattcagtagggtgggggtgggggcttgcgcggcattcattttcgagtggacatgggggcaggcaggccagtctctgatgatttaaggatgctgtggtttgaatatttgtcacctccaaaactcaagttggaatttaatccccaatgtggcagtattgagaggtggggcctttaagaggtgattgggtcacaagagctctgccctcatgaatagattaatttatttatagattaatgggttatcataggagtggggctagtagctttataagaagagagagacctgagccagcacgctcagcccctcaccatgcgacgccctgcactgccttgggactctggggttcccaccagcaagaaaacctcaccagatgtggcccattgaccttggacttcccagcccgcagaactgtaagaaatacattttgtttcttttaaattacccagtttctgttataagcagcaggaaacagactaagacaaggggcaagccagcctctgcccacaaggagctccattctggtgtggagagacccaaacacacaactatgctctttgtcttgctagagacttgttttgtggtggccccaacctcaacttgccagcaatttgtaaaagaaccaagtcaattttacacagcaaattaaaccccagggtaaatgtgtgtacctggattccaatagtaggtaaagattcttaatggtgaaaactatgactcctgttaaaactcttgtgttctgttcttaccactgagtttaaacaacaactctgtgctaatcgtataaagaatatttttgtctggactgtctacggccaagttctccaccctggatgtgcacagaatcccctggggacttcaggagctcactggagctggttccacccccatgcccaggctctgatgtgcttggtctgggctggggcctgggcaccagtgttgtcctagttttgtgttgctatgaaggaatatctgaggctgggtaatttctttttctttttcctaggtgaggagaaggatagaggctgggccattataaagaaaagaggtttgtttggctcacggttctgcagggtgtacgggaagcacggtgccggcacctgcttctggggaggcctcagggagcgtgcactcatggcgggaggtgtctcatggtaagagaagaggcgagagagaggggcgatgccaggatttttttaaaacaaccagctcgtgtgggaactaatagagcaagaactcactcatcaccatgaggagggcactaaaccattcattctggatccttccctatgacccgaacacctcccaccaggccccgcctccaacatcggggattaaatttcaacatgaggttcggggacaaacgtccaaactatagcaggtatttctgaagaacacccaggtgtttcaaagctggggtgaagccgtgggttaacactgtttttcagacatggctggagacctggggttcctacaccacagagtctccctgccagagttctcagctcctggggaggctgaggtgggtggatcacttgaggtcaggagtttgagatcagcctggccaacatggtgaaaccccgtctctactaaaaatacaaaaaatgtagccaggcgtggtggcacacacctgtaattccagctactcaggaggctgaggcacgagaatcacttgatcctgggaggcggaggttgcagtgagctgagatctcactactgcactccagcctgggtgacggagtgagacactgtcaaaaaaaaaaaaaaaaagaaagaagaaagagaagtatcatgataaaagaaataatattttaaaaaaagacagtgtggtatttgcatcaagatagacagatcaatagaacaaattagagataccagaaatagacccacaaatatgagcaagtgattttcaacaaagctgcaaaggcaattcaataaaggcaagttttgttctcagtaaatgatgctaaacagttggatatccatatgcaaaaaaatgaactttgatccataccttgtactatattaaaatattgtcaatatggatcataaacctaaatgtaaaagctaaaattataaaacttctataagaggacatagaagaaaacctttgcaaacttagatcaggcaaaacattattagataggatatcaaaacataatccatcaaataaataagatgtttcatcaaaactaagaacttctgctattccaaagacactgctaagaaaatgaaaagacaagcccaaggctgtaagacaatttttgcaaatcacatatttgataaaggacttgtatccagagtatatcaagaactctcaaaactcaataacgttaatggaaaaaaacagattctgtaaaatattttaaagaggtttattctgagtcaatatgaatgaccatggcctggagaaaacagtttcgagaggttctgagaaagcctggagaacacagtttcgagtttcctgagaaagcctggagaacagtttcgagaggtcctgagaaagcctggagaacacagttttgagtttccttagaaagcctggagaacacagtttcgagaggtgctgagaaagcctggagaacacggtttcgagagctcctgggaaagcctggagaacacggtttcgagaggtcctgagaaagcctggagaacacgatttcgagaggtcctgagaaagcctggagaacacggtttcgagaggtcctgagaaagcctggagaacatggtttcgagaggtcctgggaaagcctggagaacacagtttcgagtttcctgagaaagcctggagaacagtttcgagaggtcctgagaaagcctggagaacacagtttcgagaggtcctgggaaagcctggagaacacggtttcgagaggtcctgagaaagcctggagaacacagttttgagtttcctgagaaagcctggagaacacagtttcgagaggtcctgggaaagcctggagaacacggtttcgagaggtcctgagaaagcctggagaacacggttttgagaggtcctgagaaagcctggagaacatggtttcgagaggttctgggaaagcctggagaacacagtttcaagtttcctgagaaagcctggagaacagtttcgagaggtcctgagaaagcctggagaacacagtttcgagaggtcctgagaaagcctggagaacacagtttcgagtttcctgggaaagcctggagaacatagtttcgagaggtcctgagaaagcctggagaacacagtttcgagaggtcctgggaaagcctggagaacacagtttcaagaggtcctgggaaagcctggagaacacagtttcgagtttcctgagaaagcctggagaacatggtttcgagtttcctgagaaagcctggagaacacagtttcgagaggtcctgggaaagcctggagaacatagtttcgagaggtcctgggaaagcctggagaacacagtttcgagaggtcctgggaaagcctggagaacacagtttcaagaggtcctgggaaagcctggagaacacagtttcgagtttcctgagaaagcctggagaacacagtttcgagaggtcctgggaaagcctggagaacacagttttgagtttcctgagaaagcctggagaacatagtttcgagaggtcctgagaaagcctggagaacacagtttcgagtttcctgagaaagcctggagaacacagttttgagaggtcctgagaaagtgtgcccccagcagtcagattatactttggtttcatagttttcagagaggcaggagttacaggcaaagacagaaatcaatacatagaaggtagacattggtttggccccaaatggcagggtatcttgaagcagggtgtacaggttatatgttgattcagagattctttaatttgcaactggttaaaggtataaagtttaattaaaaaattggagtcagcagaaaggaatgttttgagttaagatataagcttcttaacccataggggtgtgtgacttaactcctgtctggcacagccttaggtcctgtttataatttgatatcttattgtcacaaatagtttgttttgttggtcttatgaaatctattttaacattaatgcctgagatgtatgatgagatgtgtccaacttcccttcccatcatggccagggattcagtttttaaggttttctggggttcccttggccaagagggggtctgttgagttggtgggggccttaggatttcattttttttttttttgaaacagagtctccctctattgcccaggatggagtgcagtggcgctatctcggctcactgcaacctctgtctcctgggttcaagcgattctcctgcctcagcctcccaagtagctgggattacaggtgtgcaccaccacacccagctaatttttttgtattttcagtagagatgaggtttcactgtgttagccaggatggtctcgatttcctgacctcatgatccacccaccttggcctcccaaagtgctgggattacaggtgtgagccactgcgcccggacacactttgctagttttttttttttgttttgtttttttagtagcagtgctgggattacaggtgtcagccaccatgcctggctcaaatactacactgtcttgattactacagctttatactcaaatactacaccatcttgattactacagctttatactcaaataccacaccgtcttgattaccacagctgtatactcaaataccacaccgtcttgattaccaaagctttatactcaaataccacactgtcttgattaccacagctttatactcaaataacacaccgtcttgattaccacagctttatactcaaatactacaccgtcttgattaccacagctttatactcaaataccacactgtcttgattaccacagctttatactcaaatactacactgtcttgattcctatagctttatactcaaataccacactgtcttgattaccacagctttatactcaaatactacactgtcttgattactatagctttatactcaaatactacactgtcttgattactatagctttatactcaaatactacactgtctgattactacagctttatactcaaataccaccctgtcttgattaccacagctttatactcaaataccacaccgtcttgattaccacagctgtatactcaaatactactgtcctgattactacagctttatactcaaataccacaccgtcttgattaccacagctgtatactcaaatactacaccgtcttgattaccacagctttatactcaaatactacaccgtcttgattaccacagctttatactcaaataccacactgtcttgattactatagctttatactcaaatactacactgtctgattactacagctttatactcaaataccacactgtcttgattaccacagctttatactcaaatactacactgtcttgattactatagctttatactcaaatactacactgtctgattactacagctttatactcaaataccacactatcttgattactacagctttatactcaaatactacactgtctgattactacagctttatactcaaataccacaccgtcttgattaccacagctttatactcaaatactacactgtcttgattactacagctttatactcaaataccacaccgtcttgattaccacagctgtatactcaaatactacaccgtcttgattaccacagctttatactcaaatactacaccgtcttgattaccacagctttatactcaaataacacactgtcttgattactatagctttatactcaaatactacactgtctgattactacagctttatactcaaataccacactgtcttgattaccacagctttatactcaaatactacactgtctgattactacagctttatactcaaataccacactgtcttgattaccacagctttatactcaaatactacactgtcttgattaccacagctttatactcaaataccacaccgtcttgattaccacagctgtatactcaaataccacactgtcttgattaccacagctgtatactcaaataccacactgtcttgattaccacagctttatactcaaataccacactgtcttgattactatagctttatactcaaataccacactgtcttgattaccacagctttatacgcaaataccacactgtcttgattactatagctttatactcaaataccacactgtcttgattactacagctttatactcaaataccacactgtcttgattactacagctttatactcaaatactacactgtcttgattaacacagctttatactcaaatactacactgtcttgattaccacagctttatactcaaatactacactgtcttgattactatagctttatactcaaataccacactgtcttgattactatagctttatactcaaatactacactgtcttgattaccacagctttatactcaaatactacactgtcttgattactatagctttatactcaaataccacactgtcttgattaccacagctttatactcaaataccacactgtcttgattaccacagctttatactcaaataccacactgtcttgattaccacagctttatactcaaataccacactgtcttgattactatagctttatactcaaataccacactgtcttgattactacagctttatactcaaataccacactgtcttgattaacacagctttatactcaaatactacactgtcttgattaccacagctttatactcaaatactacactgtcttgattactatagctttatactcaaataccacactgtcttgattactatagctttatactcaaatactacactgtcttgattaccacagctttatactcaaatactacactgtcttgattactatagctttgtactcaaataccacactgtcttgattaccacagctttatactcaaataccacactgtcttgattaccacagctttatactcaaataccacactgtcttgattactatagctttatactcaaataccacactgtcttgattactacagctttatactcaaataccacactgtcttgattactacagctttatactcaaatactacactgtcttgattaacacagctttatactcaaatactacactgtcttgattaccacagctttatactcaaatactacactgtcttgattactatagctttatactcaaataccacactgtcttgattactatagctttatactctgttttgaggtcaggtagtgtcagtccctctaacttcatttttcaaagttgttaggggattataggttctttgcaaatttctatgcaaattttggaatcagtttgttaatttccagaaaaaagcctcttgcaattttaattgcattaaatctatagatgagtttgggtagaatcggcatatggagttttctgatgcatgaacacagcataactcctatttacatctttaatttctctcagcagttttacggtttttaatgtatggcttctgtcagttgtatttctaggtatttcattttttgatgctattataaatagcattgtttttaaaaatgttcatttgattattcgtttctaggatatagaaatcccatagatttttgtgtattgattttgtatcctgaaactttgctgaagttgcttattagttctagtagcttttttgtggattatacccaactttctacacagatgatcatgtctgtgaattagacaattttttatttctaacctggacaccttttatttctttttcttgccttattggtttggttagagtgtccagtacaatgttgagtagaattgaacatccttgcctccgtcttgctctgaggagagacatggattaagatttaacttgggtttttcatatcaggctgacacattctcctattcctagtttgctgagagtctttatgagggatggattttagattttgtcaaatgctttttctgcgtctattatgataatcatgtgtttccttttttagtttgttaatataacgaatcacactgattttgttaaactaaccttgcattctggaataaactctgcttggtcatattatagtattttttcaaatattgatggattttgatttactaaaatgttgttaataatttttgcatctgtgtttatgagggatattggtctgtaattttttttcttgtggtgcttttggtatcagagtaatcttggcctcaatgaatgagttgggagacagtccctcttcttcagtttcctcaaagagttctgtgaaattggcattcttttctttttggagacagagtcttgctctgttgcccaggcaggagtggcgtgggtcacatcagggctcattgtagcctcaacgtctggcaaagtgatcctcccatctcagccttccaagtagctggaccagaagtgtgagccaccacacctggctaatttttaatttttagtagagacggggtctcgccatgttgcccaggctggtcttgaactccccacactccagggatgacaccttcactcaaatcacagcccctctggctgttcgttcctggagccccttgtgctgcgttggcccctgcttggtcctggtctgtctggccaccctcaggctcctgcctggtgtgtcacacctcccgcatctactgtccctcctggctccaggcacctgcccagatgccactccaccgtctcccctcctgtctgagatgcagggcatgaccacgggtgctgctcttagagcttcatgctccgtctgccccactgggaagcagctgagacctcagtcagccaccttgggggcccagattagtttgagacacttgagacctgttaagtcccgttccacagacccctctgagcctcctccatcaccacacatgtgggaagatccaggccagtgggacctggccaaactggtgatggggagcatcccaggggcttggggacacttggtggccaaaggttggagagggtggaggatgctcagccagagccggagcagcccctttggtgggacaattgcagaaaactgatagtaacgcaaacaattcttgttctagaactgcaaaggagttttgtccagaggaatgaagtagatgagtgttttgtggatgtctatttcacaccctggattgtcgatcgtggtttgggtcctccttggaactgggctcctaacgctcaacaggcttcttcattcattattgttgggggttgagttgtgtctcctaaaagatatgttggagcctcagccgggcgcggtggctcacgcctgtaatcgcggcactttgggaggctgaggcgggtggatcacgaggtcaagagatcgagaccatcgtggccaacataatgaaaccccgtctctactaaaaaaatacaaaaattagccgggtgaggtggcaggcgcctgtagtcccagctactcgggaggctgaggctgaagaatcacttgaacacgggaggcgggggttgcagtgaaccgtgattgtgccactgcactgcagcctggcgacagagtgagactccgtcaaaaaaaaaaaaaaaaaaaagttggagtctcaacccccagcacctgtgagtgtgaccttgtttggaagtggggtctttgcagatttaattagtccatttgaggccatggtggacttgggtgtccttacaagaagagggaaatttggacacagaagatgcagaggacagtgctgtgtgaagacagaagtggtggaggctggagggatgcgtctgtgagccagggagcatccaggattgccagaaactagaggaggtgaggaacggtcatccctggagtcttcggagggaatgcagccctgacaatactggattccagacttccggcctccagaactaagagaataattttctattgtttaagccagtctgtggtcctttattatggagccctaagagaccatgcagtgtgcgtggaaggggctgctccagacagaggaaaccacacacgcagatgtcccaggaatggggggtaggggaaggaggtgctgggtcatggagaacctttgaactgttttcctaaaggcaatgggaggcttctttaaaaagcctaattctggaaaaggttaaagcacacattttgaagacgaaactatgaccctcaggccagaggttttatttaacttgtgttggttttaacccctgggcctgagaacagagaacagggtgagtgtgacagaggcatgcccgcttctggggaggccagtggggcctctgcgcctcctggcaggggtcactcaggaagaacaagaggtcgagtggaagactatgctggatgttaaaggtggaattttggtgcatttgtcctggaccactgacgctttcttgttcagcacaagggcgatggcaatggccactggcaatcctgggctccaggtgtgtgcatgtgtgtgcgtagaggcactggagtatccaggcatgttcatgtgtgtgagtagaggcactggagtacactggagtatccaggcgtgtgcgtgtgtgagtagaggcactggagtatccaggcgtgtgcgtgtgtgagtagaggcactggagtatctagtcgtgtgtgtgtgtgagtagaggcactggagtatccaggcgtgttcatgtgtgtgagtagaggcactggagtatctagtcgtgtgcgtgtgtgagtagaggcactggagtatccaggcgtgttcatgtgtgtgagtagacacactggagtatccaggcatgttcatgtgtgtgcatagaggcactggagtatccaggcgtgtgcgtgtgtacgtagaggcactggagtattgacacgctaggggtggacatgcccagtgtggatgccctgcagtgctaccctgggaagcagatgatctgggccatctggtggccacactggtactgtgctgctctgtgtttagctgggcatgtgctctgggctgggcatgagacaaaatgaggatagctgctgggctgtggatagttgttcacaggggtgcaggctgttgtaggtgggccaggaggggctgggcagcccatgagggtgaggctgagactccacactgagcccaggtttaggggacctggtgggggtcacagcctcccctgtcccagacttctcctggcctctctcatgtcctatgagaccccctcactgtccaccctcatgtcctgtagagaccccctcactgtccactctcatggcctatagagaccccctcactgtccaccctcatggcctgtagagaccccctcactgtccaccctcatgtcctatagagaccccctcactgtccaccctcatgtcctatagagaccccctcactgtccaccctcatggcctgtagagaccccctcactgtccaccctcatgtcctatgagaccccctcactgtccaccctcgtgtcctatagagaccccctcactgtccaccctcatgtcctatagagaccccctcactgtccaccctcatgtcctatagagaccccctcactgtccaccctcatgtcctgtagagaccccctcactgtccaccctcatgtcctatgagaccccctcactgtccaccctcgtgtcctatagagaccccctcactgtccaccctcatgtcctatagagaccccctcactgtccaccctcatgtcctatgagaccccctcactgtccaccctcatgtcctatagagaccccctcactgtccactctcatgtcctatagagaccccctcactgtccaccctcatggcctatgagaccccctcactgtccactctcatggcctatagagaccccctcactgtccaccctcatggcctatagagaccccctcactgtccaccctcatggcctgtagagaccccctcactgtccaccctcatgtcctatagagaccccctcactgtccaccctcatggcctgtagagaccccctcactgtccaccctcatggcctatgagaccccctcactgtccaccctcatgtcctatgagaccccctcactgtccaccctcatgtcctatagagaccccctcactgtccaccctcgtgtcctatagagaccccctcactgtccaccctcatgtcctatagagaccccctcactgtccgccctcatgtcctatgagaccccctcactgtccaccctcatgtcctatagagaccccctcactgtccaccctcatggcctgtagagaccccctcactgtccgccctcatgtcctatgagaccccctcactgtccaccctcatgtcctgtagagaccccctcactgtccaccctcatgtcctatagagaccccctcactgtccaccctcatgtcctatgagaccccctcactgtccaccctcatgtcctatgagaccccctcactgtccaccctcatgtcctatgagacccctcactgtccaccctcatgtcctatgagaccccctcactgtccaccctcatgtcctatgagaccccctcactgtccactctcatgtcctatgagacccctcactgtccaccctcatgtcctatagagaccccctcactgtccaccctcatggcctgtagagaccccctcactgtcaactctcatgtcctatgagaccccctcactgtccaccctcatgtcctatagagaccccctcactgtccaccctcatgtccaaagagaccccctcactgtccaccctcatggcctgtagagaccccctcactgtccaccctcatggcctgtagagaccccctcactgtccaccctcatggcctatagagaccccctcactgtccaccctcatgtccaaagagaccccctcactgtccaccctcatggcctgtagagaccccctcactgtccaccctcatggcctgtagagaccccctcactgtccaccctcatgtcctatagagaccccctcactgtccaccctcatgtccaaagagaccccctcactgtccaccctcatggcctgtagagaccccctcactgtccacccatatggcctgtagagaccccctcactgtccaccctcatgtcctatagagaccccctcactgtccaccctcatggcctgtagagaccccctcactgtccaccctcatggcctgtagagaccccctcactgtccaccctcatggcctgtagagaccccctcactgtccaccctcatggcctgtagagaccccctcactgtccacccatatggcctgtagagaccccctcactgtccaccctcaggaccctctgcatttgctccttgggttcccggaacttgagcttgggtcttggtccacagcagctttgggaagggccctcggctgctttttgcttcagcagctggggagcagttaactttcagacccggccctcccccaaggcagctcagggaggggctggacactcggttatttatgtatttacttatttttaaatcaaagcacagcaaacatgaccatgtgggggtggcccagtggaccctcacagtgagccctgggccacacagaacatggccctggagcacccctatgaggttttaacagggttttgggggaccttggtgcttcctaaagtttcgggatgagtccccggggtctccagactgcgtctgcctcctcgtgcaccagagggtggcagtaactgttcatgtttgccccatccaggggtttttaccaggggtacctcatcctttctggggagtggggagagcacctgagggggtcggcctggaacaggaggttgcagcccattgcctgagtcttaaagtgtgcccttccccacagcacttcaggatcactctgggaccatcctaggattaggaattttaaaacgtttaaaaaaaattattttcctttttttgggggaaattggttatacatccagatgattcaaaaagtaaaagtttaaaaataaataatagtttaaaaaatgcgcaaaacaaaaaaactgcatacagtgaaaaggaagcatttctttttttaaaaaattttattattattatactttaagttctagggtacatgtgcacaacatgcaggtttgttacatatgtatacatgtgccgtgttggtgtgctgcacccattaactcatcatttagcattaggtgtatctcctaatgctatccctcccctctccccgcaccccacaaaagtccccggtgtgtgatgttccccttgaaaaggaggcgtttctgcttctcctctttccggtccttgacagtgattccgtgcatcacaaacacacacgctccctcagttacacgaatcacaaacacacgctccctcagttttgtgcatcacaaacgcacacgctccctcagttttgtgcgtcacacacacgctccctcagttttgtgcgccacaaacacgcgcactccctcagttatgtgcgtcacaaacacagacgctccctcagttttgcgcatcacaaacacacacgctccctcagttatggacatcacaaacacacacgctccctcagttttgtgcttcacaaacacacacgctccctcagttatggacatcacaaacacacacgctccctcagttttgtgcttcacaaacacacacgctccctcagttatggacatcacaaacacacacgctccctcagttttgtgcttcacaaacacacacgctccctcagttatggacatcacaaacacacacgctccctcagttttgtgcttcacaaacacacacgctccctcagttatggacatcacaaacacacacgctccctcagttttgtgcttcacaaacacacacgctccctcagttatggacatcacaaacacacacgctccctcagttttgtgcgtcacaaacacagacgctccctcagttttgcgcatcacacacacgctccctcagttttgtgtgtcacaaacacacacgctccttcagttttgtgcttcacaaacacacacgctccctcagttttgtgcatcacacacacattccctcagttttgtgcgccacaaacacgcgcgctccctcagttttgtgcatcacaaacgcacatgctccctcagttttgggcatcacaaacacattccctcagttttgtgcatcacaaacgcacacgctccctcagttttgtgcgtcacaaacacacacgctacctcagttttgtgtgttacaaacacacacgctccctcagtttcgtgcatcccaaacatgctccctcagttatgtgcgtcacaaacacgctccctcagttttgtgtgtcacaaacacacacgctccctcagttttgtgcatcacaaacacacacattccctcagttttgtgcgtcacaaacacgcgtgctctctcagttatgtgcgtcacaaacacagacgctccctcagttttgcgcatcacacacacgctccctcagctttgtgcttcacaaacacacacgctccctcagttttgtgtgttacaaacacacacgctccctcagtttcgtgcatcccaaagacgattcctcagttttgtgcatcacaaacacatatgctccctcagttttgtgcgtcacaaacgcgcgctccctcagttatgtgcgtcacaaacacagacgctccctcagttttgcgcatcacacacacgctccctcagttttgtgtgtcacaaacacacacgctccctcagttttgcgcatcacaaacacacacgctccctcagttgtcaggggactttgcactgtgcctttgcatgaaacaccatggcttgaagaggtcccgcatcgttagggcccccttgcccatggtgtggcgtcccctgaccgatttagccgttattgagggacatcgaggttgcttggtgtggcggcccctgaccgatttagccgttattgagagacagccaggttgctttcaacgttttctttttcacagacagtggtgccaaaggcgtccttggacatgagtcgtctcccagtgggtgagcacatcttagggcagatttctgaaggaagatgtgccaggcagagggggtctgaagttttaactttgaagggcgtattgtcacactgccctccacagagcttgtaccacggaggtggtggcagtgtcttgctgcccatgccttcctaatgtgtgtgttgtgaagtctctcgttctttctttttaaaaatttattatctttaattttttaaaatgtagagacagggcctcactatgttgctcaggctggtctcgaactcttgggctctaatttttgtatttttagtagagacaaggttttgccatattggccagggtggtctcgaactcctgacctcaagtgatccgcctggctcggcctcccagaatactgggattacaggcccttgacccatttttcttattgtgttgttggattttgtcttattgatttgtacggggcgtttacatattaaggaacttacacctacatacttgcagatatttttttcatttttttcttaaaaaattttcttttgagagacagaggtctcactgtgttgcccaggctggtctcaaactcctgagctcaagggatcctcccatctcagcctctcaagcagctgggtccacaggtatgtggcaccacctcccctggtttgttatttgacttttgtctttgcttaaggagttttgccatagagaattttctttttattacatgaggtaattaatctttttcataatatcccccttcccccatgctttcttctagtactatttaaattaaaaacttttaaatctttttaaatctatccaggctttattttggtataagagccaaggtcgtgattgattggtgtcagttagcatccatggaggagacagatgtcaccctcaacttgggaaatttgaggagagatgaataaagggactaagatgtggttggcatgtagagaaaccactaaggctaatgctgggtgggacccctcaggcctcggaggacacagggaggctgcaagggaggtggtcctgcaggagcagagacctgggtgtggggagactcgagtgcaggaccctacagggagggctggggaagcaaacacccactcccagttggctccctgcaggccagtcccacccagcagcccggagtcaggcagccgcaggtggccctgcaggtcacagaggtggaaagtggggtgggccagatgctggacaggtgcagcacaggacgctgggatgagctttgccagatgtggctccattactgaaccaacaacaaccgacttgggggatgggcacttccagaagctccccagggcacctggactcagcccccaggggtgcagtgtgcggttgggtgttggaggcctcaggtctgggcctagtggaggccaaagggtagggccagtgtggaatgagctgaccacaagctgttctagacaaggctgtaatctgcctttgtgaccccagggctgtccatggggagctctatggacctctcaatgtcagcgttttggggtaagggtgggggtcaggtgatgctgggatagatggggcagggtctgtgggggtggggagggccggggaggctgttgtcattcattcatccagtgcacacgggtgaagccctgctctagccacgccctggaacaaggccatgaggaatcagacactagcggttacttttaacgagcacctactgtatgcaggttccttgtgttgaccttcaggagctcatttactactcacaacaaccctgccgtctaagtgaggagactgagtttcagaaaggttaagtaacctgcccgtggtcacaccgagctgggattcgaacgcgggactggctgactccaggcctcaagctgtgttctgctaagctgtgctgctgcctctgggaagtctcacagagatgaaggccagcctgtctccacttttggggaattcaccctccattgggtgggcagaggcctcattatcaaataaggacagcggagagattcgtgctgagccacatgcgctgtcctgcactcacccattcttgcggcacgggaactgagcacgtatgttgagctcctgccaaaaagttatgatgcttcttttttttttttttctttttgagacgcattcttgctctgttgcccaggctggagtgcagtggtgcagtctcggcttactgcaaactctgcctcccgggttcacgccattatcctgcctcagcctcccgagtagctgggactacaggcacctgccatcatgcctggctaatttttttttgtatttttaggagagacagtgtttcaccatgttagccaggatggttttgatctcctgacctcgtgatcggcccgcctcggcctcccaaaatgctgggattacaggcatgagccaccgtgcccagccaagttatgatgcttcttgacataaaatctttaagcattaaaacaatattaaatcataaaatcagtataagaaagtctaaaacattgcagattttcctgaggtcaacttaaacacttaaaaaaaaaagccaaattcttaaaacaattgtttttggtgtcctgctttgatggttccctaaacacttgctctgactattagaaattctgtacctgggtagctggggcccccgtggagagggagcagctcgcccagtgagagaggcttggccattgtcctgcagggactctgctgttgggggagcgggcagggcatgtgcagtgtggggtgtggcattcagagggagtggcctccacagccctgtggctggggtagggagcccaggggggccatccatgtttctcttgaggtacctggcagaaggcgggtggggggggtgcggggggtggtccttgacagcagagcagagagagatggtggtcagaggcccaggcgggctccgattaggcccaggccagggtccgggatccataggaacccctcgaccaccaacagggccttgagcaccctggccagggcggaggtagtccaggacagaggacagttttgccagtggtgagtggaatttgggttaggggtagggttagggttaagttcaggcgcttgggaacagacagtgaccaggaagcctccggcagctgtgggccccagggctgacctgctgctcgtcctgctgctcgtcctgccccgtgctccaccgtcctggtttgcccaggtgaaggggtttccaggactctccgttttaaaaccagcacaatctgggccaactgggacacactggtcaccttgctaatgtgtccctgttcctgagggggaaagcggataggcagttgtcccccagggcccagggaaagaagccaaggcaaggtgcagacagatttccctgccccagactaagggagctgtggacagaggcctttgctgggaggtgctgggtcctttcctccaggcagcgctgggatttgggccccgagacctcgtgtttctctgacccagggaagaagcctctgtccactctgggccttgcccttcttttgttttccttggtggagggagggagaggaggtcgccagcactgtttgcccgagtgaggctcatttctcctttgtctgcacaaggctggactgccctgcattttcatggtaagtttgtttcttcaagccgttgttaaaatcctggaggcagagaaaatgcatttgctccatcaccttccctgaggtgacaagtcctataaaacctgttaaagcctttaatgaaatccctgctcagagctgctctgtgaatgaatgtggaatcagaatttaaattaaaatgttgctcttgttgtctggaggctttgcctgggaagaaatgaaaggggcagctcacctttctgccaccgttctcaggccgggtgggcgccatgactagccaccctctgacccagggctgggggcccacctgtgactcacgggctgggtcaagatgctagctggatttcaaggcagtggctctccccacacctgagactgtccctgctgcaggccccacagaaaatcccactgagggggaaggtgggtgtgcctgtggaccaggtagccacttgggactggaggttttatgtactcagaagcagagtcagtccctgagctcacaggctgatagcaggggtgtgggcagacagccgccctggaagaggaaagaagaaagtgagagcgactaaggggctctggggtgtgtgagtgggttggtgcaaggtggaaaggaggcagggaatgtcttcccaaatgaagggagcaggtgggaggccaaggcaacgggcatgaggcctggaggcctcgtggcttggctgggggcagtaccagccccgctcctacctgttcagcctccccgctgcagctcttccctctttccttcacggagtcctgctctttggacttaacacactcaggagtctgttgttaaaaaacaaaccaaaggctctcttagcctcgaccccatcacagccaagttctggagagctctctgctccatctcctcttgtctccccctcctcctccctctccacttctgcgtgtcccggagagacagagacccccaggcacccttggctggtgggagagacagcacaaacatgaacggctcacgggccgcacatagttgccttcactgcggggcgagacacagctgtgtggaaccggcccaggccctgagaggtgctttcctctcctgttttccaagttggcagcgctaccctatttcttctatgatgaaaaggaactctaaaagcattcaaaacatttaaaaagtgtgtgtaagaagtgttttcatccctgcatagattacctccagtgaaaaatcagctatgccccccccgccacttaaagtgctgtgaagctgttgcagggagggccccgggtcccaggaggaggccaggggaccctcggggagggcagggaaggtgctgcagggagggccccgggtcccaggaggaggccaggggaccctcggggagggcagggaaggtgctgcaggtggagagacttcgggacacgtggctctgggagcaggtgcaaagggttatagctgaaggaaggagaggagccatagctgattattcattgacggtaatgctacacagggattaaaatcagtcaacttgaataaaccttaagaataaggctgaggcggggcgcggtggctcacgcctgtaatcccagcactttgggaggcggaggcgggccgatcacaaggtcaggagatggagaccatcctggctaacatggtgaaacccccgtctctactaaaaatgcaaaaaaattagctgggcgtgatggcgggtgtctgtagtcccagctactcgcgaggctgaggcaggagaatggcgtgaacctggcaggcggagcttgccgtgagccgagatcgtgccactgcactccagcctgggtgacagtgagacttcgtctcaaaaaaaaaaaaaaaagaataaggctgaagctggtagggcgcagggtgcgtgcctagatttagtcccagctacttgggaggctgaggcgggaggattgcttaagtctgggaggttgaggctgcagtgagctatgactgtgtcactgcactccagcctgggtgacagagcgagactccatctctttaaaaaaagttgagctataaaaacaagttgtaaagggttttgttctgtatgatcacatcaatgtaaactgaaaaaaatagtatgtgttgttattggatgtgtatgtagatacaaaaactgtgaaaacatgcagggagatgatacaaaccaatttcagagatgcccccgctggggaggagggcacaggacaagcattcttcattgtctgtctgacagtgtgttttgaatgcgtgtttgaatattttcatgcttaaaaagtaaacaacaaaagatgatgggagataggatgaggaggcagcgtgctgaaaagggtccatttctaggtggcgaagagagtgagttggggcagtgggctgggcagagggagggcttcgaggattccaggaagaattctgtaggaaaaggagccaggcagaagggtgggagagccacaggggctggaagcggggtggtacttccaggaacctgaagcccaggtgaggacaggtgcttgtgccatgccaccgtgggggtgagaacttgggcagaagaggccgtgtgtgccgagggaggggtcgggagagggatgaagatctgaattgaatggatgctgagaggaagcttagtcatgcatcgccaaagacggctcatggagtaaatagagcactaaaggctggctcactcgcggagagctgtttcctgtggctcaacaagtttataataaacacagttaaacttttatttatggcacagctgctaattgcaccataaacacttttcatcaggcaattgctgtttactcatttgccaatcagctcattatccagctacctctccttgttcctgccttcccacttcccaaatcctactgcttctagggcgtccctctgcaactgtacccccacccaactgcctggcctgactcctggcaggtaggccccctctccagtccgcccaggctttggtaggtgtgcctgcccaggctaggctctgttctgctgctgaccatggccagccccgactgtccagcatcctagtgtttgaggccctgaacaatgcccctgctgggctctcctgaccactcttttctctggctcccaaacctcacggcccctggggatcctcgcctccctcttttcctgcgtttatcccagccccactcagcatgcccagaggtctccccacccatctctctcctagaccaggggttacataaaacttaagccagtgttcctgagggtccttcctttccttaagagggagcgtgttccgaatactcaactcctgccgcttgtttgctgggttcagtgtggcccctcgctcaccattacctcgcagagcactgagacagagcttacacttactcataccttggttcattggttcacccgaccatggccacctccacacaggtcatggtgtgagtcgcctccccccatgttccctctgcagagctggctccaggatgagcctgagctgggagatcctctggatggaaggaagttccaccctgtatccagttactgtgacacctgcccccctatgagctaacaggcccccaggtgggtggggaccagagtcttagggtgtgtgctctgtgtgctctgcagcacccactttgcagacatcagcgttagcggacatgtgtgtgagtgagaatgctcatgtgagtgcatgcatgtttaggtgagtgggcatgtacatctacgtgtgaatggtgtctgcatgtacacacatgcacaaaagtatgtatgtgtaaacgtgtgcatatgtgaatgacatgtatatgctcatgcagatacgctaatgtgtatgtacatgcgtgcatgtgtgtatgtgtaagtggtatatgcatgtgtgtacatgtaggtttttgtgaatatacaagtgtatatgtgcacataagcagtgtgtatgtgtgcatgtgtttgcacatgtgaggggtgtgcatatatatatgcatgtatatgcatgtgggcagtgtgttcacatgtgtatatgtgcatgtgtgcatgtgtgtgcacatgtgaggggtgcgtgtatatatgcatgtatatgcatgtgggcagtgtgttcacatgtgtatatgtgcatgcgtgtgcacatgcgaggggtgcatgtatatatgtgcatgtactcacgtgtgtatatgcatgtgggcagtgtgttcacatgtgcatatgtgcatgtgtgtgcacatgtgaggggtacatgtatatatgtgcacatgcatgtgtgcatacagctatgcacattgtgtgtacatgcacattgtgtgtacatgtgtatatttcaggatgtgcatatgtgtaaaagttgtgtacatgtaagtaatgcatgtgtgtgtgcatgtgttcaagtgatttgtgtgtgcatatgctacacatgtgtgctttcatgaacatatgtgtgtgagtggtgagattaagtgtatgtgcacagaggcctcagactgagtctgatgggggtccctgctagctctggagagaatgtggtagcagggctgaggcccttgtcttcagctgaatgagtctgcctggcgtgcgctcagtgctctcccgctctcctgcttctcttctgaggtcagtcacagacctggacatccggcttgtggggagtattgagttgcagtggctgtgtgtgcttttgtatgtgaacacatgtgctcatgtgttgcatgtgtgtggtgtgcactgtgtctggatgtgatcataggcagcattttggggtatttttgggtgtcagggtactcactgggggcattgaagatgcagtggcaaagcaggtgtccaggagtctgagctcagacttgactttctgcctgggtcagcctagattttctacatggaagtgaggtgaaagggagaggaatatttgggagcccttctctgtcccttaggtccctaggagcccaaggatggtgagagggcccagcccttggtttttgatctatttgagaggaaccgagtaatcttctggggtctgctcttggcttcttcagtacagtgaaattagctgagcagttcctctgggcagagcctctgctaacattcctttgaagcctccctccatgctgggaatccagcaatgtccagtgataagcttgggaggaggacatacttgcagtggaagagacaccatgcctgtcccaccagccccttcacttttggggtcaagcattattagagccctgccaatggattgtgtgtgtcgtgacagatgtcagctgggaggaaaagacactgggcccctcctgcacaggggccttatttctagagaaagggaagactgaggtgcaacgtgggcctgtggttagggagactgcattctgaacaccgtgggaagaatgctagaagctctcagcctctgccttcctctgccatgctcgagctggtcagtcatggtccccgaggccctacagcagcctgcagggatcagggcagcaaaggtgctgcaaaaccagcaagaccaacaggactgtacaagaccggtgttccacggcgacaccttgtggttgcaatggcagcagcactgcctgtggaaggacaaggctctcctgcagctcctccctaccaggctttggactaagcctccagcatttttggacagttggcatgcatgttggaggagagtacttgagaaggaaataatgggctgggtgctaatagaggatttggaggctcacacactaaatggggaaggactcattcatacccattccttcttccgaaatgtctccttccatgtcctgccctcgtacccattccttcttccgaaatgtctccctccatgtcctgcccaggcctgctctttgggtctcctggctggtgggggaacagatgtggcgtaatcacgtcgagatgcagcaggtgcaccaagcactgtgcgcaccgctgttagccccaggacccccagtgtcagcactggtggggctggtgtttgtggagtgtgtcagtggactggcaggcccgtggattccacgtgtgtaagagagactgacagcccttcctgtctcagagcagcccctcctgggtcccatcctgggtcccatcttggggttggacatgcccttgtttgagcttggccccttcttgctgggccaccagccctgaccctaaatctgagagggggcttggctgggcctggggtcaggggacaaacagccaccctggctgaggccctgggcagctgaggaacttcagccagctttgggcagctcttgggttgggagatgggctgctgttttctcggacaacgccctccccagcccctcaagactctgttttcagtcagttcaattagtacaactttaaagcaattagggagaattagtggccaggctgctgcaggcagatgctgaatacactcatgccccctcccccaacctccctcaccgaacctgacagctgctgcggggagtgcctttctctgctggctctgtcctttctcccagagatccagcccccatctctccttctctcaagggtctgaggaggggagggtgggcagtctaggggacagacccagagacaggggccctgggactgggagggtggggcaggcccggggaaatgggccaacttcccctcaagaccccaggcctgggcctgctctaaggagagaagggatgggtgctggttggaggctcagcccctgagtgagggtgagggtactcagcgcggattgggaggactgaccaggattgtggcccagcctctggccctgtggcctccaggagcccccagctctggtgagggcaccctttggtggggctgggggctgttcttcagtgggaggcctctgagaggctgggcctctcccactaggtgtggggtggcagcgaggccctgcttctgagccagtgctggagccacaccaccttctctgcctggtagtgaaggaggtggccccgtgggtgctgcagaccctgggccctccctggtgccccttgggctgctctgtggggagagctccaggtgcttgcttgcgtggatggggcaccagggcaggtgcagggctgacttcgcagatggagccctttgtgcggggaccctgtcttccggccttgcccctccctactcccccagcttctcaaagaaggtctgttttctgagcctcctctgtgatgcccccaccagccgcagcctccctcagatgtgtggggggtgtccgcggtcctaaccaatgtcttttctgcatgtgtccacgtgtatctggcactttctctgagcaggctctgggctcagcaccgggtaaggcagatccatgcagcccctcaccttggccgaacactgaacagatgatgacatgtacttgtgcaattccagcttcaacaagggtcaccagaacagctctgagcaattccagcttcaacaagggtcaccagaattgctctgtgcaatcccagcttcaacaagggtcaccagaacagctcggagaagggctgtgacccggtctgaaagcttcccagagactggcttagcgggatgaccctggggaaggagatagtgggtggagcagagaggctgattagaggctgagtctttatacggaagtgatggtgccctagaggcacaggagggagtgagtgctgccagtggggcaaggaggggcggctccacctgtgaccctaaccctaaccgcgtagggaaccttcagtgggcccatgatggtggcccaagcacacgaaggtgtctgtgctctgtgccttcgctgagcagtgcaagtctgggcccaggggcttcccctgaggaggggaagccaagggtgtccatgaaaagagtcaaactctgtaaagtatttgaagagatttatcctgaaccaaatacgagtgaccatggcccatgactcggcctcaggaggtcctggtgacatgtgcccgaggtggtcgggacacagcctggttttatacatttgaagggtgacatgagacatcaatcaatatgtacaagatgtacattggtttggtctggaaaggcaggacaactcaaagtgtgggcttccaggccataggtagataagacacaaacagctgcattcttttgggtctttgatcagtgtttcactgaacacacaatttacatgtgagagggggtagagaaatagtcacttatgccttaggctgactcagtgaatctgcatttttacataagcagtagggcagaggaagccatcagatgtgcatttgtctcaggtgggcagtgggatgactttgatgagttctgcctgtccattgtcccgcacctgtgaagggaagctatccatttacgttgccagggtgaaattcagcagaacagttttagggcaaagatcttgaagcccaagaagagtttctctgtggggaaattgtgagggaggatgtagacttccacacaatccttgtcactatcttattcgggaataaaatgggaggcaggttggcctgacgtgctttggcttagtgattttggggtccctagatttattttcctttcccaagtacttattacaaagtagcaggcttcaaacttggagatctcacaaccccaagtaacattctgttagaaaccatgggaccacccacaccgttgctgtggactacaagctcgtgtcactggcagctcaaagtagaaagtatcagacaccccccacctcgggggacctctgtttcagatctcaggtgactcttcaccttgaagacattcagcttaatcaaaacctcttttctgaccctttgtgccagccttcctggagggggctccccaaagaagggtctacttcttgtcccctacctccccacatccgctaagggcttctacacaaacacaggatgaaatgagaggaaggtggccaccggaacggtgcttaatggccaggatgttctctccctgatgtgtgctgttcccattacaggtattcacttcttgatgaagcaatttcctatataatggccccacatggcaggctaaatgtggaaaaccaccaaatagaggcagaaatataaagacactttggatcatcatttgcagaaggcaaaatagctgcaggcagcttgtggttgagacactcagtaatggtactggccaggcacggaaagcatccacagacacagctcacaggtgcagcgtggagaattccaaccagccaaggggcccaggcaggcctccgaggaaggacgcttgacctgagacttcccccttatcatggtcaaagtgagggtgtccctgctggagcccctgcaaaggcccgagggagccgggaccttagagtctggggactgcatacagcccactttgaggaagccttcttggtttgaggagggggttgaagggcagcatcatggaccctgggttgagaaggaggtggagaccagcggggtgaggggctccaccttgactcaactccctagatggcaactgatgggggctggtctagagggctctctcctaggtgaggggctagacctgaagctcttgtgcttcctcagccctagtccccttcatggggacaggaatggtgtgtgatggtgcattcatagatgtgcatgcacacatacaggcatgtacatttgtacacagacatgcacacagaaatgtgcatgcataggcccacacagcagacaggcacatgcacacaggtgtgtacacagagatgcacacacacgtacacacagatgtgtacgcagagaggcacgcacattcacacacagatgtgtacacagagaggcacacgcacatacacacacagatgtgtacacagagaggcacgcgcacatgcacacacgtgtacacagagaggcacgcgcacatgcacacagatgtgtacacagagaggcacgcgcacacgtacacacagatgtgtacacagatgcacgcacacacgtacacacagatgtgtacacagaggcacgcacacgcacacacagatgtgtacacagagaggtacgcacacgtacacacagatgtgtacacagagaggcacgcacacatgcacacacagatgtgtacacagagaggcacgcacacacacacacagatgtgtacacagaggcacgcacacacgcacacagatgtgtacacagaggcacgtgcacatgcacacacatgtacacagagaggcacgcgcacatgcacacagatgtgtacacagagatgcacacatgcacacagaaatgggcatgcacatgcacacagatgtacacacatggatgttcacacacacacacatgcacgcaaacacagcccctctgcagctctgctgtctgcctcaggtgggggccatgctgggtgaaactgtcatttctccctgtctataagctcctgccttgaggctatgaagacaagaggatgtgaactgctctctggaggcagaagacgtgggttcaaatcttggctcttctctgggcctcaggtttctggtctgtagactaggatattggagttttactcacgttactggagggatgagggccctaaatcaggagctgggaactggtgcatggtaagttgtgggagtggaggactgtggagaaggacaggccttccctaggtgaggtgctactactgtggaaagtggtctagtttcccctctgcccctatgggcacccagtggaagaagctggtggtcagtgatgggcggactagtcctgaggtcctaagactggagtgtctggatgatcagtgtgacctctcagagaagaggtgcacacctaggggtctggctaagggaaggggagggtgtcagtacaggaactgcagggactaggtcaggctgggtacacagaggcaaggacagggtcgtgaggctggtgcttgatgagaaaagctcagtctagacatctgggcctaggccccaagaagagtggggatcaggccttcatgggtggtgttggagagccctgaacaggatgtgacttggtcttccctgtggagaactcaggagactagctggaccattcaggtatttaaggagcaatgtcagtgtgccaggaactctcggggagcttatatcccagtggaagagacggctcacctctttgagctttctggcaaagtcaagggtgctgagtgctgtgtcagggccatccaaaggtcctgagatgagtgggacttggaggaggtcagtcaggaccagcctcgttgtgggtgttgaaacacaggagtatctgtgtggaggaggcctggggggctcctggcagggagcggggcgcagaggagcacgaggtcctcaaggttctcagtggtggcatcaggagtgcccaggtcaacttgtcctgggcagaggatgggttcagaagagaacatcggctgtgtatcctttgtatcttccagaggtacacagccctccccagccgccctccaacctcaggacaaagtgtgggtgtgcgtttggctcctgcgttcccctgtctcctttgtccacaggatgctcttggctgccaggaggttcccactcctcatctttccaggcccgggtcagaggcactgaagtcagaaacagaggtggcaattccaacctaaaagcacaaattacagacaagtctccctcctgcaggtttccatttgcatctggcttttgtgtggcactagaagagatcagctttttgcaagcatggggctgatgaacgcatttgcacaaagggagacggcggagtagcaggagtttgcaagctgcttcattaacttggagccagtggaatgtctgggatcgtctgtgatttggaaaccggtggcagaatgttcccgcgtttctggtcctcatcagtcaggtaggttgaggggagcccaagacgagcttgtggctgcagcgagggtgcaggatgggtacacatctcggtggtccagctgggtctcagctaccttgaatctgacccacgggctttgtgtggtctcagggcttgtgtgtgtgtgtttggtccgctgtgtacctggtgtgcacacattgcctgtcacgtgggtctctgttggaagctcttgcccgtcggttcttcatgtggtgctgtcggacatctactggtctttgagcctccaagtctgtgttggctgctgcaggtcggggcctgggactttgtgtaccagtgacgtggccccactgaggccccgttcctgactcagccatgctgtcatggccctcagaaaagatctatcatttctttgatcctgtaaaacaagtaaattcagtcttcctgtgaggcacggtgatgattcactggaatcatcccagtgtgtaagggtacttcctcctgccgggactgccaggcgggacggcttcctgcagactcagagggtccaaggcagggtttccaagcagactttgcagctggatgagaggaggggtcagcgcacctgcttcatacagagactgatgtgcctgggcccaggcaggcccgtgctccaagcaccctgttcctcaggtgggacagcctcatcttctttttcctttttttttttttgagatcgaatttcactctgttgcccaggcttgaatgcagtggtgtgatctcggctcactgcagcctctgcctcccgggttcaagcaattctcctgcctcagcctcccgagtagctgggactacagatgcacaatgccatgtcctagtttttatattattagtagatacagggtttcaccatgtttgccaggatggtcttgaactcctgaccttgtgatccgcccgccttggcctcccaaagtgctgcgattacaggcgtgagccaccatacccagcctgacagccccttctttagagccggtgcctcgggctcccaggctcggggtggggctcacacccctcctctcatgatcttgcttatcccttggggtgggggggggacctgtgtcctcccaaccccaagcacacagctgtcaccccaggtcacctcctctgcctttctcccagcaccctgcatgctctggcctgggcagccccctccccctgtgcccttggtggcatttgcatacaggtgcccttgcagctgaagtgttggggcagggccagcaaacccacgcccgagagggccagtggctcttggcacaggtggtgggacaatggccactcagaacacggctgcgctcccctgccgcctccttggggctcacaccttgctcggtttagtcgctgtctgagccttagttcctggtcataactgggctgtgcggggcttggggcctcatatgaggaggaactgatggcctgtgtgtgctggcagaggaggcggtgtcatcccggcgggtctctgcagatccactgcacaaacactgcatgtgtgtatgtgcagtgtgtgtgtttatgtagtgtgtttgtgtgtctgtatatatgcgtgtgatgtgtatatggtgtgtatgtgtgtttgtgttgtgtgtatgtgtgtggtgtgtttgaggtgtgcgtgtatttgtgtgtctgtgtgtgtgtggtatgtatatggtgtgtatgtctgtgtgtggtgtgtgtgtgtgtctgtgggtctgtggggtctgtttgatgtatgtggtgtgtgtatgtgtgtgtctgtgtgtgtgtgtggtgtgtatattgtgtgtatgtctgtgtgtggtgtgtgtgtctgtgggtctgtggggtctgaggtatgtggtgtgtgtgtgtttgtgtgtgtctgtgtgtgtgtgtggtgtctatatggtgtgtatgtctgtgtgtgtgcctgcatgtgtggggtgtgtgtgtggggtctgttgtgtgtatgtggtatgtgtgtatgtgtgtgtggtgtgtatatggtgtgtatgtctgtatgtctgtgtgtctgtgcatttgtggggtgtgtgtagggtctgttgtgtgtggtggatggaagggcctcccggggctcttggatttggagggcccacgctgctctggcctgggaaggtggggttatctggagggtatattaggctggggtcctggggaaggttctggggctctaggcagagctcctggtcgggtgcaggcacatgggcttgttgggcagtcccaggccttccaggctccatggcccgtgttccctgttgttctggtgggtgtgccctttaggcacctgcccagggtcccctgtgccatcccagctgccccaacactgtgtgccccggctctgctcctggaccccacgccgcgtgccccggctctgctcctggaccccacgccgtgtgccctggctctgctcctggaccccacgccgcgtgccccggctctgctcctggacctccgcatgcctcctgctcactccagggcagaaacctcctgtcctggctctgcctccctttgaagcctagcaggggacccctctggccctgggtctgtccctcctgagctctcatttgaggaaggcaccagtgaggcccttctttggctcagatccagcctttggtgccagacggtccagggcgtcagtcccagctttgtctgggagctgcgggccctcgacccttctgagcccacctacaagttgggaacaacattgtggaccctcaggggactaaaggatgaagctgccctgtgcccggcaccaataggagcatcctcgttcctcctcctcaggggctggacccatagcttgagtggcagtggggacatccaacctggcttcctcagtggggtttggccatggaggtgctcagggtgtgcttgttggaatgatgggggatctcgctctgggatctgtctcctagaccctgtccagggctccagctgccccttccctctctgggctcccagctgggatgggagggccttgggcacaggctgtagagcccctgtggtcggctcccacccctccccagagtgctgcatgtgaggatggggactgcctcactcaggaagccatcctgtcatcccagagtgtggtgttggcctcgaactggctcttgatctcccatgtggggcatggctggaaccatcccagggtcagtgtgtctcaggctccagcttgggcatcttgggacagagactggaggggtgtttctcccaacatggccaggccagcgtggctgtcatccttggacatcagtcagcagctggccagtgcctaccggttccaccaagctccattcttgggaatgcagggcccggacattcagtccagagactttccctcccggggctctgctgggggtgcccctccccatgagcccatcttgacatttgtgagccctgctctgtctgctaatgagcgatcttcaccagtccagcctgccatggcaaccgcccgcagcctcgctctctgtccaggcacccggtagctttatctccgaggccatctgttctgggagcacaattccaaagccatttaaacagagcctggagcagggcaaggcgctgggccctctgtcctcacacgtgtctgtgcacacactcaggcacacacacgcacatgcacatgctgatgtggtgtgacccctgcagggtggaaggtgatgacagggacagtcagggtgccccaccggctgctcccttttcctgctgtcaccgagccggttcctgggcaccctggtggtcggccagtctgtgtcctcctctctttctctgtgttcctcacctctctgtccatctgtgtgtctgagccggcctggtttctgcctcacctctctgcctgtgggccacctctccctctccatcctttgtctcctttcctgcccctgtctgtgtccgtctctgtgtttaatcgccttgaccctggtccctggaccccctccctggccattgcctctgtttctttggcctttgtctccagctcgtatctctcctactggttcagctgctttttgcctttggctatcgttctgtgctggtaggaccaggacatcagggggtttccacccctgcctcaccctcttggatgctcctagaacagtcaggcaggggcctgtccctcactgttctcctggtccactctgggcgcacctgtctctcctccccactttcctctgcctcagggtggccaggtcatgaggcgggtgggggggcgggggtactttctcgtactgctcttagcttcctgggcccagtgcccagggtagtgccttcagcctgagcttcttactctccaagcccttcactctgagctcctccctctgagcccagtcccgctgttcattgaatgtgcttccgtttcccgccctgcggccttcactcatgctgtgccctcaccctttcctggtcaggcctccctgtcaggagcttctgtctctctctccacagggctggacagatgcagcatcctgggctcagcatggagcctcctggcttccccaaaccacgcatggctgagcttgcagccttgttcagctgaccctgccctgcaggcccctctgagctccacagagcgttgacaccagtctgacttccagggggatgggaaggaagcccctctgcagctgcttccagttcttcctgaggcctggcctaggctgcccctgctgcagggagctgtctcctctggtgccacagcagtcacggtgactttgccttctcctgccggtgcccccagccctcagctgtctctcctctgtctttcctctgtccccacatcctttgtctcctgggctgggctgttgctgaggctgctgtgagatgcacagatccccaggacccttgggctggccccctcagaggcttgagggcctggtgacctgggtcctctgagcagcttctgtcctccaggtcactctgctgtttcagcatccccacagcccagccaaccccctaggatgccgccttccaaggtcatggccctgggtcagggcagagcaggcagaggagccgtatgggcagaccagaggggcttcataggtgcccctgtattgggtgccctactaaagcagaaaccagtgccagcctagacagcgatgaccagcagcctgtgacctctggagcccgggatgtgtccggacatatcacgtcagcccaggtggcgctgagtgctgggaacccagctatggtgggtgatgtccagacggcttcccttgggtcagctgcagcccggcttcctgttgagggcagggaggtacagtggctacacgcagccctgagggaggctgaggtattgccaccttcaatagccagagctgcatcccacacacggggctggactctcccggctgtggggtgaggctgggccgcatggcctatggcaaatgcccctcaaaccctaatgcatccacggtcaacctggtgagttctgactcagcctggccaggttcccctggagctggccccctgagcacgtgttgagttggggtgggggagctggagggcctttctcgagcagaacttcagagaggagcgctggccctgtctttcctgattctgaacgtgtccaagtcgtttcatcacgtgatggattaccaggctggttggttctaccgaaaggcagcagcacaagcttttcctggatttctcaccattgttcctttaaataatcagtcttaattaactccatccgaagaacatattttccccaagggtagggagtcccagtcaggtggagcaagttggaactgcaaactgcatttgatagctgtggtgttgggaggagccccctggctactgcgaggggtgtctccgtgatgggcgggcagatggatcagcaccaacccctgctggcactttctgacatttctgttgccctcatttgatagatcgggaaactgagtcacagaaaggtttggcaatctgccccaggtcacttcccctaagcacagacgtccttgtggacgaggagaagaggcagaactcacaggggaaaacccttcttccacacagcatctgctgtggccagctgcccccacctgcccctgtccccacctgtccctgtccccaacctgccccacctgtccccgtccccacctgctcctgtccccacctttcccatctgcccctgtccccatcctgtccccacctgccccacctgccccacccatccctgtgcccaacctgccccacctgcccctgtccccacctgttcctgtccctacctgccccacttgtccctgtcctcacctgccccacctacccctgcccccacctgcccctgtccctgcctatccttgtcctgcccacctgttcatgtcctcacctgttcctgtcccccacctgcccctgtcctcacctgccccacctgctccatcccacctgtccctgtccccacctgtctttgtctccacctgccccatccccacctgccccacctgcccctgtcctcacctgtcccacctgcccctgtccccacctgcccaacctgtctgtgtcccccacctgcccctctggtccctgccaccacctgccccacctacccctttcccctacctgccccacatgccccacctgtgtcccccacctgctccacctgccccacttgtctgtgtcccccacctgccccacttgtctgtgtcccccacctgctccactggcccctgccaccacctgccccacctacccctttccccgacctgccccacctgtccctgtccccacctgccccacctgcccctgtcctcacctgcccaacctgtctgtgtcccccacctgccccactggtccctgccaccacctgccccacctgaccccgcccctcttctaccttcctgaccccatcccctcccctccccctacttgctccacctgtctcaccactgccatatgcccctcctggccccacctgtcctacctgtctcccctgcctccaacctgcccctcttttgccccccacatgtcccccctcccccctcctacctccacctgccccacctgtctccccacccctacctgcccctcttggcctcccacttgtcccccctgcacccacctgcttcctcctgcttctcctgcacgctcaccagcctctgagcaccttcacccctcgatgttctctcctctaaacaagatgactcaccatttatttccagcctaatctctgcccccagcctcagcctccatactgtcacccttgttgacggtgtcacctggtgactaacaggcgctcagacatcccagcagagccagcaactcccacaaatctgccctccttcagcgtctccctctcagggggtgctgccgcccacctcatggctctggccagccctggagtctcctgtggcctctctgtccctaccacatccagaccctcagcaacccgattcattcctgagggggtgtcccaactcgaatgcaattcgtcacttctcttgggacaccctttaccgtctattgccgcccagtagcactcaccatagacctcactgaagatgtaaatgttaaacattttgctcttggtcacccagctgggaggggccggtcaggggtcagtccagatctgcctcctccaaaggtttgaaccctccatactccgggcctccccctcagtgctgccctggatgggagagactagcctggacttggccacgtgttggtagaggtaagccagcatcacctgggcctccacctgtcccctgcagggacagacacctgcagaacctgaggaccaggaggtgaccctgagctgcctggggtgatgggagcttccctcggcatcaggggaagctggcccagaggacagccgggctccatggtgaggccaagttcatcgtttcaaagggcccctgtgggcagtgaaaggtcgtgggcccagttcgagggactaggaatcattctggaagaggcctctgcagtgcccaccttcactcccatccacacaccctgcccctccctggccctggcgcggctgtagctgctggaaggtccaggtccttctgggcagccctctctccctgccctttccttcctgcacaccccaccctctgcctgcagggcctgaggttgtcgagggattcttgacttctacagtttgcctccccctggcacctcccaccataccttgtgcctgggatctggtggtggggagtcaaccacaccagctgagggccctcaggggccttgtctcaacaggcagtgattgggttgtagggagcgagacctgaccccactcatgcatcctggctggttccccaccaggtttcaggctggacctagtgtggcagttccgagagaggaagcgggggaagggatgcatcttcaggaagggccccctcccctcactcactgtgagtccattactgtgtgggaagggctgtgtctctgcctcccctcactccccttccctggccctgcggggtgggggagagattgtctggggcctgagcccattgtgtggagaagagagcctcattggcaggcagccggggcatcaatttgtgattatctgctccctggtcttgattggctggatgcagtggggtctccccagggccctgggacacaagtttgtgcagcaactttttccagcatgaagtgacgtgtgttcccagagagaaggtgcaccccctggccaggatgacgctctgcgggaccttcctgggtgcgtaccacccccagcccctcgcgtccctccctggtctgttcacaagtttctgcgaagatgccaaagggactaattagctgtgtgtgtccccccctcagagctcagtgctcttttctgggcagccaaggaggtgacagacatgctccctcctgaacaatggccagggcccctggggaaacagccacctccccttctagcggatcccgtggcttgcagaagtgctgacggcacagagccctgtgaacgctgccctgcagaaggttggaggtgggagggcggtgggcagggtgtgtgcagaggccagctgggccttctttctgttgatttacctgcctggatctgcctggcaggccatatagctggtgggtgtcaggagcccttggcctggagcaaggctctgtgagactctgtgagaaggtggcagagagaatgtgtgtgcgcgcgcgcgtgcgcgcgacagatgtcccctgggacttaactgtagctaaggggctttggccagggccgctgctgcttgcgtcctcatcacactcaaagttgctgtgtgtgtgagtgcacgtgtgtgagtgtgcatatgtatgtgagggtctcacaaactggatgccaaatgtttgtgagcgtctgcgtgagtgtgagacagaaacacaaagtcagccccgagtgtggcggagagtggatcccggttttgtttgctccatctgccagggccggcctggggcagcacccccgccctcagctgttctatacaatattaatgctcaccatctcggcctcacacaacggccctaattgtcgtctgcagcattaaggcaggcgcccatctgcggggaagctttcagaaggaaacaagaaaaccctcacccccagctggtcaccggagaaggtggtgccaattacagatgcagaaagtttagaccaaaattacttgaaagagtttttatgaagcaaatgaactgacacttggaatgtctgtgtgcagatttgcacaagtaattacactttatttgaaatgatcttaccagctaagcgatcattaagcctgctcccccactcacacaaagcgctttctcagcgagtgcggctgcggcgtaagtttggttttgcaaatctcccgtttccctccccgtgtggagtctgaggacccgccagtcagacaggagttatttcctggtggatctttccaaacatattattaaaaagtcacatgtgactttcccacagacttttatgaaataaaacccaaaggaacagcgtgcaacatgctcagttatggaagagaaaatattttatgatttcaaaaagtcctgacaaattttcaccctctctaagaaaggaagcttaagactataccttgctgttgtcacttacaagcagggatctgttggggtttggaattctctgtctcagcccggagcccagagttcagcgatagctgaatactggtgcgagctcagaagcttccgtgtgcggagaacaaagactgaggcgctctggggggagagcgctgtccgaagtgctgatcagacttcggatccacccaccgctcaggccgcctcccaggggctgaagggcggcagccgaaccggagagacgtgccggcggccgctcttctgtcctgctcttttccctggactcctttgtcttgacggggtcagctaaagacttcgaacctttactcatcaaagctcatcttcggaaactgctcatagcactttaacctcccggtgggagctcccagggcgccctaggtcctgccagcaggcaccgatttcaagtttccaggcacattctgaatgctcctcctggcagcgccacagagggtctgggggcccattcccgacccccggagcgccacacctcaggaggcctgtgattgttcaaaaggggaagtgagaaatgccgaaagacttacgttttcacaaatacaatttctattacctgaaaaaactgttgtgccccacgaagcccgtgttgcgcaggttcatctctcctgctgccacctccgcttcgctgtggtttcttaggtgtgactgttgcatatctgaattaagtcgctttcatgaaaccttgggtgtcgttgggaaataaggctgattcagcaacggccctccctttgattctgtattcatcatggaacaatggcccgcaagcctgcccggagcctgcagcctgccgataagagtttaatagaatttctgaatgccgaaggtttggggtgtaagacatcctagcactcacagcatgtccagaggagacagaaacggcttttcaggagtgctctcagctgaatgtgtccttttatactaatggatataagtttatgacagaaattaaaaatggtaggcagtcattgtggaaacctcgaactgttctcatttgactaattaatatttcatcctcagtttgaccagtgcaggcttgcatttatgtccttgtgctcaatctgaacaattgctctgtgtgcattttgtgttttatttgttgaggataatgtgtgcgtataagaatctaagatacttgcctttggggtgaagcttttggtttgtatgtaacgtgtaaagcacaaactgtatgttaaaaataagccactaagattttcaaaacatgctctcttagagaaagctgtgttcagttctgcctcagtcacacttttggtggcccgagccctttagcgctaattaagttggggtattgtgctcttgcataatttaccaagaaatgatgtttactgtctgttgaaatctctgcactgaacttctgagatgtgagttttctgcttctccagctgcccttggacggcggcatctttgcaggcgtctcacattgagttttcacccttgtgtttcacagtttcatttctaacatcctgattatgataatggacaatcgtttgcctgatttatcagtacaagaaggagatttgggccgcaaacaagaatactctggctcttgagttctcttactgaagaaattcccactttatccctgaatgtgggggaaaatatcacaaactggcagatgagaaggcagacagtcaggctgcatagagagtgggtgagcacttctattgtgtgtgttatggatttttctcttcttgattttcactggatagctcctttcaggccgtttataaaagaatcaggaaaagagcagaaaacttgggcagtgtgcttcgctctggttgcaataaacttagtctttttgtgggggggttcccatgcccaggaatccctgagttctctttgggaaggtttttattattgtaaaaattaaagtgaaaagggaaagtgtgagaacagaaaaatgtcttttcctgatctattctttgtgtgcatgactctattttttggtctgtggctatagttaccttttatgccgttaaaaaatacatatccatttaagtcaggggtacttgaatatgcagatgagccgatatgtaatattcctggttcatttgagtaataaattctgcagcccgctctttatgatggtagatcatattcctcaccaccaataaatattgtaaagtactttcgctgtagccatgctaacccggggcatctgtcattccggttgctgctattaggaattattggactgaaccactggcagagaaagcagaggggggtgaatgtggtggttgtgatgctctctgcccttttgtgtgttttgctttttaaaaaaactcaatcatgctgcacattgagtatgaatcagtgtggacaaacataggcaccttctgttggccgaggctcagagcaggacacaggactccaccggactgggacacctctcacccccaattcagcagatccatctttctgatgctatactgtaaatttatttcacctcagagagtaaacagatatattggagccccaagggttcatgggtagcgtatttacaaaggagcctcctccgccagcccgtgccaccgctgctaatgagagcagtcattaagtaaatgagacgtcgcctttagctggcttaggagttcgcacactaaggggagaagatatttaattgaaacccgcacgcaggcttccccacatgtgaccgctgtacgggaggcagctgccttccctctcctcccccagtccaccctgcaccccccatgtaaatttcatgattgctttccgtgatgtcattttgaaagaggacagacaatagctgtggggaaaggtaagtcaacgttacgttctttctgacaaaggcagatacccaacgcttggcttttcctcttggacagagacagggagagggcgcgcgggcagagttaatttctaagatgaaggctctgtttgcaggaaaagcaggtctgaggatggctttttgaaactgctctggaggacgggggctttcttctcctccctggcctgccgtgtgctgtttttctcctgtctctctgttgttcatgctcctctgagattccaggggacatgttgtgcgtctgacagaggagacattaggggaaggggagcgcatatcaaaaccagaaactttatgcgcatttctggaagaggaacaacggatatgtctgtggccgtgggacccagcagccccgtacctggggagagcactggccgcttaagcagaagacctctctgaagcagggtctcagagtctggggtgtgtcatgtgtgacccccacccaaggtactgaggagaggtgctcacgtgaacgttttgtctgcatgtcatgcatttctcaacttaaggatcaatatctagggtgcatgcgtctgtgggatagatgtgcagaagtaaatatcggccgctcctctcagccccttttttcgctacgtgtccgtgcagctgtggagtgtggttgtttatggtggtagtgtaactggatttttgtatttaaaactaaaaatcagggttagctaagaagttgaacaccctaatgccattgtctgtagttctggggccgtggactttggttctgtctattgaattcactttcttctctataaaccaggaaaataaacaagtgctggtggctttgtgttggagtggtgggttctcactgctcctcctgagtcaccaagggctttgcttgtctcagcatcacctttgaatcagtggacaccattggctggtaaagttgggtgtttaattttggaaaccaaacatttgcggtggtgcggggggttccgtggctgcaggtgggtttggtcctgggcatggactctgtcacgatgatgataatggcagcgatgattataattatccttttgggagaggtcggtggagaattttgcccttgcagtttttttttttcttttaaatcacagaaaactgaggacacctctaacgccagtggctgagtgcacaaaaggtgggagggatgtggggcagacctgggggggcccactcggtgctgaggggtatgctctgcctctgtctcctctgaggtgccagcagagcctgtcctggcctcactctggcctggggagtgggggtgctgtatcctctacagggctgactgagggaggctcccctcggcccccagcctccctgccaccccgggctcccctcccattggtccttggctgtgattatcgcctccttccatatggccctgttaattaacggtaaacaaaagagtaagagagcagggattggagtcctgtggtaccagccagggtgctgctatcagtagaggcaggaccctgccctgtctccctcggtagctgttccttgtgcagaggaggctgggtcagggcttagagggcagtttgttttcaaagagaaggaggcagtcttatggattcttctgtcccgtagagactgagactcctacagggtccccccgaccccctgggcacctggacgtttgccgaacttcccaggggtacttgctgatccaggagcttgagcaggagccacagagagttggacaaagaggcctttctgctctggaacagcctcggctctgacctccttgggccatgaatccctgaagagggcctggtagccctcttcagagacccgaggcaggggggctgcttctgtccaaagtgccactcgagggtttttgtgaccctcagccattgcccacagatctggaggtagcctcagttgttcagagctaatgctctggcccctcttggaagattctggcaaaggcagtggtcacctactcccttgaatgcccctggtgcatgagtggggaaacactctctgagatgaccccttctagccatgtgggatgcaaagttgctctggtctgggggttgcagcagcctctacttggaagctctgttagtgccggagatgtcagggagaggctggcagagggtatgcggccacgggggtgcatgctgggcagctctggcagctgaccaacggcagcctggatggtggctggagcttggcctgtccctgctgtggatgtggtgggcgctctccctggtgctgctcagagactcactcccttcctctctggcctggggtcactgaatgtgcagacaatgacatttgtggtggtgtggtgggtagaggagacccacaccactctgcactggggagacaggggtcagagcctgactaactgtcttcctggtgctgctcagtctggtgatgtctgggccgcttggaatgccagtttgcacaacccagtactgtgcagagagagcaggagaggttcctgaagactgacaaagtgccagagagaaacccggggcctccagccgctgctcggtggcagtgggcgggctggtgggggctgagctcttcctggacggactcagtgcaaaaggtgcgtctactttggaaaagactgagcaaggcttgtgtccacccagtccctctgtcggggctcagggtggggatgagaccgggaacaaccagaacactttggtcagcaccgggcctggagtagatgaggaggtagagaactgacccagctggtggaacaggggtcaggaggttagctgtggggtgggtgggggctgctggcggtcacctgatctgcgagcaggcagggtactggacggtcagccagactttcatgttactcaggcatcttgaagagtggatgctctgcctgtcccaatgctggaagacacatctcagagcccctcttttgttgcctgttctcttgtaggaacctgggcgggagagtggagcagggtgcccgcaggggctgggggggctcttctctttcttcctctctcccatcttcctcatcttagatcctccccctctgcattttccgtgtgaactccctcatgaataaaccagaagttagttgtctacagatgtaattttaacaggaatgttgtggtgtgagtttacaggaaaatggtctttgggaaccagcatcattagattagtcagaccgagaaacgccgtgtttcccagaagggaagagagcagtggctgccgtgctgctcccccgtgggcttcctgctctttggggactgcgggacccatccccgctccaggacagccccactggggagcccactgcccagcccggagtgtctgctggaggcctggggggtggaatgtgctttcacggcctcttgaggttcccggcatttttctgtctttcagaccaaatttccccaaacatcactttaaaaaactcaaaacaaaaatgagcaagaggaatttcaccggaattaaaatgtttttgatctcaggcttccacggagccagcttcagagagaagagattaatggatacttgcaagtggaaagtgtagtttgaaaatgtcttcctgtttctcttcagtgttactggaactaaccagatacaagtgtggagtcttttctccccagggttaatgccattaggagcgttccttgtgggaagattggtttcacccatcacttcatccttttttttattttacaatttgcacttaaaaatgcaatgttattttaatcgggaacgaaagtaactcagcgtgctttaatctgccctggctgagtacatctgccttggccaggattggagtccaggccttgcagaggagagaggatgtcgacacagctgtgggtgtctgtggtcctcctgccaccccttgtcctgcagcaccggaagcctccactcagcagccccaaccttcaagagagtgactttgtgctctggcaactgagtgtgtggtttgccctggggttgcttggagttgattggatatgttccctgtgccttggggtttatttgggactgtggcctgggagcacggcctgtgccaggagggtgcaggttggatggtcctcaggaagtaggctgcagcgctctgcaggagtcagggtggccaggcaaggtgggggtgagcactggggatctggatgctcgggaggaaaggtggaggcaccatatggcctgagctgctgacagatgagcctgctggccccacctctctctcacgcctggcttcacacctccatcgtgttcaacactggtctgagggctggggcagaagccatctgggtcctcttctttttttccattttgctgcctgcaatccacacatcagaggaggagcgtgagaagagggggccctgggtcaaggcggttggagcctctcacctggtcctgggggaccctccatgtctccctcagggacccacagagctgccagtggctgacctgtcctgcctgagtgggaggagagtgggagtttggatgctccatggtgcaccaaggcctgctttagaaggccctagaaggtccctgagactctcggaccgcaaactgacagcagcaggtgcctggggtggcctcccagtgagccagagccacagacccgaggcgcgtccccaatcccggtgtgcgcctcgctgagctagcttgtcaaagcgcttgggtctttacacctacagggtttttgggttctgaaaatcaaatggctttagcagtcctgctctgtgggcagccaaagtggctcctaactgaaggtgctgcccattctttacaagacttagagctgggggacaagttccctcttggctctgagtttcccaggataactgccgtcccagggagcccggggatggttcagagcagcctcccagttactgctgactgaatacttggttgtcagtcgctcgtcagcatgtgggattgtgctcaccctgcccttaccaaagttttgtttagggaaaaacagagatttgaaattgggacgacttactatggttaacattattttcattgagactgggccttaatcttcgaatggaacaaaaaatctgacttaggtcgtaaggggcagagaaacacgtttgacgctgttattttaatcgttgagaccgtgctaacttgttcagttctcatgaacgtgttctgtactggacactgaggctgggaggcaaattagcttcccaggtgagtggtgtagctcgaatctaagatctttccagcacagcctccctcacagtcccacccagccccacccagccttcctgccgagtgccccaggctgccatggaggctgcccgcaggccacagtatgaccctcactgccctcgtgtctcttcctcacagcctgggacatatctagagcctgtccccagcataccctccaaccttattctccgtcccaaactgggttgttacccacgattcccaaacatgcctccctatctcccttcatctcctgcagctgaatttttgcttctctttcaaggcttcttacagatgccaccccgggccctcctttacttacctttactctcacgtgtctcacatttgaaatcccgctctcgggatgcaatgtctctgctgtgacattgcatcagactgatgggtatccctgcttgctttccgggagagcctgcaggcaaccagctctgggggctgctgggcctgaggaaagcatcccaagtcaaggggctgctggacccaatggggcactgcaagtctggaccagggaaggatccacattttagctttgaggttggaaggacacttgtgttgggaagaaaagctacttaaatgctcagttgagcagttctgaattattcctccactctgttccttcttgaggttgagccctgccttctggttatttgagatcaagtccgcctagataaaatgttagactattactgcacattaaagaggtacctcttacagtcatttttttttaagtggtctgattttgttttggctggcttatttagagttttgtgcttcctcattttatttccacgaaggctgtgcccaaccttagcctcggtgagccgtgacccagccatgtcaccgatgcgtcaaagtgggttggctgtgaggcattcattctctccccatgacacagatagacaaattggtcatatatatatatatatatatatatatatatatatatagagagagagagagagagagagagagagagagagagagagagagagagagacggagtcttgctctgttggcctggctggagtgcagtggcgccttcttggctgcaacctccgcctccgggttcaagcaattccgtctgcctcagtctcccaagtagctgggactgcagatgcgtgccaccaagtctggctaatttttgtattttttttttttttaacagagatggggttttgccatgttggcgaggctggtcttgaactcctgacctcaggtgatctgcctgcctccgcctcccaaagtgctggtattacaggtgtgagccactgtgcccggccaaatttacccaatttttaagagttatgacgtgctgcaagcttgctgccttccctcatccagcggtaagtcctgtaaggagtctgcttcctaggtgcatcagccagatagggaaaacaaagggatttgttactgaatggcattcagggaagcaatccctagaaggctgcctggagcctgtctcggggaatccgttccaggactctgggccctgcacctcttccctgtggagtgtcacccacaccggtggcctgggctttgtctggctgcaaatcgcacatgcggcttctaagtcagaacctgctgctggatgtggagctcccttcatccccagggtctgagcctttgtccttggctgacccctatcctctggcatctggaggaacccaaaccctaacccctaacctctggcatctggaggaacccaaaccctaactccctacacctctggcatctggaggaacccaaaccctaacccctaacctctggcatctggaggaacccaaaccctaactccctacacctctggcatctggaggaacccaaaccctaacccctaacctctggcatctggaggaagccaaaccctaacccctaacctctggcatctggaggaacccaaaccctaaccccctacacctctggcatctggaggaacccaaaccctaaccccctacacctctggcatctggaggaacccaaacccacttcaatataagagttagagtccaattcctcttcctggagagccctctgatggccttgggaccctggacctggtgagctctccccctgccagcccctcctactggccacccacttcctgcccagtcacccagaggccaggccacctctggtgtgggtaaagcgtttgtgttttccccaaatgtgttctgtgttggctctcgtgtactgaccactgtccatccaggctgggaaattaccatacacatccccccgccccccacaatttttctaagcctgtagagcagcagagggggctgctctgagccctggagctagggctgcagttggacccatcagagagcagctgcctgggcttaccctacccaagcagggatttgggcaggggtcctgcagttggagagcctgggattggagaaggaaaacagaactgttgtgaaagccaaaatccccaagggctttgaggcctggggatcttccctcgagctctctcccttctgaactggggatgagccagcgtgtgggctcatcctgaccctaaagggaatgtgagatgcccctcctagtggaattttgtcttcaaggcctcagtaaaatgtggttttaaggcagaaggagatggccatttcctttctttttgggctggaaagctgaacggttctaagaaaaatttctgggaccaaggaacgaaaatgctggagcagaattccagagcaggacctcttgatcccgcgaagccgacgtgtcttctggggagttcccaaagatccatggggaagacgcccccaaacccagtgctgctggctctggccataccctctttttttttttttttttttttttgaagatggagtctcactctgttgcccaggctggagtgcagtggcgtgatcttggctcactgcaacctccgcctactgggttcagcaattctcctgcctcggcctcctgcatgtgccaccacacctggctaatttttgtatctttagtagagacagggtttcaccatgttggtcaggctggtctttaactcctgccctcaagtgatccacccacctcggcctcccaaagtgttaggattacaggcttgagccaccattcctggcctcataccctcttaattcttatcttgcatctggaatacctgttggaccaggcctgtttccatcacagccccttcttattgcctttgtgttctctgtgttctaccccttcccataccccaggattcaggcaggcgagtccagttgtgcctgattggaaaaagtgtctctgatggtggcccagtgaggcaaggcccatgggtcagcctggccaatttccctcccctcctgagcaccgtgggagggtcaggcctcaagcagccctcggaggcagcagtcacagacagaggtgggctgttggacaggtgcggctgatagagtgggtgtcttttgtgggcttctccccagcctgtggcctggcctagtcagtagagatggtcaggggagcaggagggagcccataccccagtgcctgtagttgtgtccatttcccctccctgacttctcctcctgcagcatccttccctttagttgtgtccatttcccctccctgacttctcctcctgcagcatccttccctttagttgtgtccatttcccctccctgacttctcctcctgcagcatctttcctagttgtgtccatttcccctccctgacttctcctcctgcagcatctttccttgtagttgtgtccatttcccctccctggcttctcctcctgcagcatctttccttgtagttgtgtccatttcccctccctgacttctcctcctgcagcatccttccctgtagttgtgtccatttcccctccctggcttctcctgcagcatctttccctgtagttgtgtccatttcccctccctggcttctcctgcagcatctttccctgtagttgtgtccatttcccctccctggcttctcctgcagcatctttccctgtagttgtgtccatttcccctccctggcttctcctgtagcatctttccctgtagttgtgtccattccccctccctggcttctcctgtagcatctttcctagttgtgtccatttcccctccctggcttctcctgcagcatctttccctgtagttgtgtccatttcccctccctggcttctcctgtagcatctttcctagttgtgtccatttcccctccctggcttctcctcctgcagcatctttccctgtagttgtgtccattccccctccctggcttctcctgtagcatctttcctagttgtgtccatttcccctccctggcttctcctgtagcatctttcctagttgtgtccatttcccctccctggcttctcctgcagcatctttccctgtagttgtgtccatttcccctccctggcttctcctgcagcatctttccctgtagttgtgtccatttcccctccctggcttctcctgcagcatctttccctgtagttgtgtccatttcccctccctggcttctcctgtagcatctttccctgtagttgtgtccattccccctccctgacttctcctcctgcagcatctttccctgtagttgtgtccatttcccctccctggcgtctcctcctgcagcatctttccctgtagttgtgtccatttcccctccctggcttctcctgtagcatctttcctagttgtgtccatttcccctccctggcttctcctcctgcagcatctttccctgtagttgtgtccattccccctccctggcttctcctgtagcatctttcctagttgtgtccatttcccctccctggcttctcctgtagcatctttcctagttgtgtccatttcccctccctggcttctcctgcagcatctttccctgtagttgtgtccatttcccctccctggcttctcctgcagcatctttccctgtagttgtgtccatttcccctccctggcttctcctgtagcatctttccctgtagttgtgtccatttcccctccctggcttctcctgcagcatctttccctgtagttgtgtccatttcccctccctggcttctcctgcagcatctttccctgtagttgtgtccatttcccctccctggcttctcctgtagcatctttccctgtagttgtgtccatttcccctccctggcttctcctgcagcatctttccctgtagttgtgtccatttcccctccctggcttctcctgtagcatctttccctgtagttgtgtccattccccctccctggcgtctcctcctgcagcatctttccctgtagttgtgtccattccccctccctggcttctcctgcagcatctttccctgtagttgtgtccatttcccctccctggcttctcctgcagcatctttccctgtagttgtgtccatttcccctccctggcttctcctgtagcatctttcctagttgtgtccatttcccctccctggcttctcctgcagcatctttccctgtagttgtgtccatttcccctccctggcttctcctgtagcatctttccctgtagttgtgtccattccccctccctgacttctcctcctgcagcatctttccctgtagttgtgtccatttcccctccctggcgtctcctcctgcagcatctttccctgtagttgtgtccatttcccctccctggcttctcctgtagcatctttcctagttgtgtccatttcccctccctggcttctcctcctgcagcatctttccctgtagttgtgtccattccccctccctggcttctcctgtagcatctttcctagttgtgtccatttcccctccctggcttctcctgtagcatctttcctagttgtgtccatttcccctccctggcttctcctgcagcatctttccctgtagttgtgtccatttcccctccctggcttctcctgcagcatctttccctgtagttgtgtccatttcccctccctggcttctcctgtagcatctttccctgtagttgtgtccatttcccctccctggcttctcctgcagcatctttcctagttgtgtccatttcccctccctggcttctcctgcagcatctttccctgtagttgtgtccatttcccctccctggcttctcctgtagcatctttccctgtagttgtgtccattccccctccctggcgtctcctcctgcagcatctttccctgtagttgtgtccatttcccctccctggcttctcctgcagcatctttccctgtagttgtgtccatttcccctccctggcttctcctgtagcatctttccctgtagttgtgtccattccccctccctggcgtctcctcctgcagcatctttccctgtagttgtgtccatttcccctccctggcttctcctcctgcagcatctttccctgtagttgtgtccattccccctccctggcttctcctcctgcagcatctttccctgtagttgtgtccatttcccctccctggcttctcctgcagcatctttccctgtagttgtgtccatttcccctccctggcttctcctgcagcatctttccctgtagttgtgtccatttcccctccctggcttctcctcttctagcatctttcctgctccctggtagcctcttgggagccacctatttctggaggtccccactctgggttccttgtcctgggtgtggggcgaatgtgctggactggggtcacagcattgaaccccacttggagctgaggatgttctcgccccagaaggaaaagctgtgtgtgtctgcgtggagcagtgtggagtggtttccttggtgccgcctgggttccgggcacccggcctgggtgtgaggcctggtcacatggctgaactgctctcccaggcaccccgggagggatgaatgtgacactattggtgtccctcccagcacactgcctgccctgggctgggcacactcctcccctgttggcagccggggatgacaggccgcctggagagcccgtcctgtgatttggtttggaaagtcattattactgcagagcagtttagctgttgtttttacagcgttggtaaggttaaaagaaataatgataataatataagaaagactcagccacagtaactgcctgcaacatgctatttgcatttttaaggaaacacttctttgagacagcctgggtgaaaggtcactatttgcatataaatggaaaagaaagtgtatgatgctggaagttacatctgtattattttctcagcagtgagctgctgttggagagattagaggacatggcttgcatttggcttttattgaatagagaaagtaccagcgaggctgatttagaagcaaaataatgagagaaatgtgcaaagctatagaattgccaactccctgcccccacctctcccttctctcattttcacctaaactcagcaaaagctggtctgcctttgcgccactcagcaagtcttcattttacttctctctggattccagagaggaaaaaaaaaaaggaaagaaaaagagcaaaacttgccctcattttcccctcggtcccatttgtgtttcctgccagtgtttcctccagatgccccaaaccccggagcagaagcccctgtgactgtggccccccagggtgtggagaggaagaggccctcggggcggggacaagagggcacccctctccagggtggggacaagagggcacccctctccaggggtggggacatgagggcacccctctccgggggcggggacaagagggcacccctctccagggcagggacaagagggtacccctctccggagctagtgggcctgttttggacccgctgctgggaaaggctgggggcaggggcaaatgtggggggtcctgtgtgggctgagggagtcctgttccaccttcccctcagccccatgggacccgcagtttctagggcatgggttccaccttcttcatggaaatttccaagcttgtcagactttctcaggtgcctggtcccctgggctttccaggatgcccccaggaacaaagccagccatccctgagagaaaccctgggtggggctggggccggcacctgcccagccagctttggaagcagacttggctgagcacatcatggacttcagggtcttccaggagcagtcctgggacagagggaggtggagcgtcctgcccggaggaggcacctcaggatcctccttggtcccagcttctctcttcacagaggcctccactgaccactggttacttaaatcacagtcccccatcctcattattttcaaaaatacattttgaaacaatctcaaagccacagaaacgtttcaagtaaagggccaagctgtttctcctgagcgtttgagagcgtgttgctgatgcgatgccatcaccaaggacacttgcatgggtgtttccagcagagaggccgctctcccactgctccaccctcaccttctcggccatctggtcctcagacccattcaggggtgggttcagaaccacgtgctgtgcgtggtcctggtgtctcgttcgtctgaagtcgtttttagcactcctcgcctttcgtgaccttgtgcttttggaagagcgctgagccgttattcagtgggatacccttcaacgtgggagcactgagccgttattcggtgggatacccttcaacgtgggagcactgagccgttattcggtgggatacccttcaacgtggcagcactgagccgttattcggtgagatacccttcaacgtgggagcactgagccgttattcggtgggatgcccttcaacgtgggagcactgagccgttattcggtgggatacccttcaacgtgggagcactgagccgttattcggtgagatacccttcaacgtgggagcactgagccgttattcggtgggatgcccttcaacgtgggagcactgagccgttatttggtgggatgcccttcaacgtgggagcactgagccgttattcggtgggatacccttcaacgtgggagcactaagccgttattcagtgggatgcccttcaacgtgggagcactgagccgttattcagtgggatacccttcaacgtgggagcactgagccgttattcggtgagatacccttcaacgtgggagcactgagccgttattcggtgagatacccttcaaggtgggagcactgagccgttattcagtgggatacccttcaacgtgggagcactgagccgttatttggtgagatacccttcaaggtgggagcactgagctgttattcagtgggatacccttcaacgtgggagcactgagccgttattcggtgagatacccttcaacgtgggagcactgagccattattcggtgggatgcccttcaacgtgggagcactgagccgttattcggtgggatgcccttcaacgtgggtttgtccagtgttgcccgtgatgcaggaacacctgagtgggaggttctcccttcacctgatgctgatttgtcccttaactcataatgttgacttggtcactggattagatggggcatcccagcacctctatgccagagggaaatgccagtcattttccctttgcaattaataaatatttggggggaaggtactttgaaactatggaaatatctccatcctcaacaaaccatcacttaactttgatggatatctctatagactcgttgtttcctgttttaccccatgggctgaaagccttctttggatgctcagattgtccctgattgaccagtggaagcccagtacagaggctcctgcagcctcggtccagctcccctgtcctttcttgttcttgcctttcctgcttggggcctggaactctggttccttttattagaaaatggtgttagcctgagacctgggtgttgggcctctagtggacatggctgggaagacgtatgtgtgtacacacacatactcacatgctacacacagttacacaatgctacacacacacagttacacacacatactacacacaggctacacacagttacacacacgctacacagttacatgcatgctctatacagttatacacacatgctacacacacagttacacatttgcacacagttacacactcacatgctacacacagttacacacatacgccacacacgctacacacatgctacatgcagttacatgccacacagtcacacacagttacacaccacacgcagttacacacacatgctacacacaggtacatgctacacacacgctacacacagttatacatgctacacacacgctacacacagttacatgctacacagttacatgcatgctctatacagttatacacacatgctacacacacacagttacagacacacgccacacacacaccctttttcacctaggtctgtatttacttctccatctatcgatgtttattgaaaaacacaagttcatattgataacctctgattccaattcccacacagggttcattctaaggttctgcctttccgtaggcataacgtcctcttccaacagtgagaaagctggtttccattatctttaatgtgtttacttctttgatccacctctttccccataccagcaccctccttactccacacaagtgctgaccccttgctgagcccctctctgcaggccaacctctgggtcgccacaggacagccccaccctctgttctaggccttggtggggacaccttctcccctgcaagggctctggtgctggggagcctcactggccagttgcccaggactttggggttcacagggtgtgggccaggacaatccaagtataatgggctgattggcctccctgtggctccagaactggaccttttcggacacttgtgctcacagtgaccagctagcttcctttgtagcgttgagcgttatctttctttatcttcagtgtttcgctggtggaccaaacagtttaccagtgttatgtctcatacaagattttgtggtttgtttttcttgtagacagtgatcaccacccctgccacatgcacctccctgccctcgcttcccttactcgcggttcaatgctcagtttttgaggctgtgcatatctggatttttttattcttctacttcctgtgatcagtgttttgcctgggcatagaggacatgccctgaagttgaatgtcaactcccttgaaattgggaagaggctttctctactgtctgtgaatgctgctctggagcaatgtgatcctattctagttatcggttttgtttgtgactttttcccacttcaaaagcttttagggtcttttttctattcctggtgttttaaaattttatagtgccgggcttggttggatgtgggtctctttttattcacgattatgggcacttaatgggctttttaatctaaaaatataatttcctttagttctcggaaaattttttttattatttaacttacacttttccttcccattttcttaattctctctttctggaactcccaaatcgggtgtcagtcctcactcagcgtttcctccgtctctgctatctcttcgtccttttgttcactttcctagtatatttctttgactctatctcccaagtcttctgttgaatttttcattttggttttacaatttatttccaagttggggaggatggacacaatggtattaagccttcccaaacaagtcctcctgtcactgtctgggctgggccatatctgccctgtccacatgcgtctggagagtctgtgtcctgcctcctggtttgtccttgttcctgctctaaccgctgcccacactgttagtcgagggagcctgaaggagcctcctgaaacactcatttgctcatccagtgcaggttcctcccacaggccaggaaaggtcccaggaacagccattattgagcaccctggcagttctcagactgcggtggggacctcgctttgaactttgagaggcagatgctggacctagtatttctgctgcctcctccaggagccatgtgacatggatgtgagtctgtttgcctcctagggccttaccttcctatgtctgggggtgtagcctggacctcaggggtgtccccttgggtgtcagaggctctttgggactagagggaggaatcctgggctgtggtcccccaggagtctactgtgacctgtgactggtttcgtgtgggccttaaattgtttctaaatttttattctaaccgttttcttgctgccttgccaggctctgatttaaacccaagtagcagcaagaaggggataaatgagggattgagaggagaagcaggaaaaaagttttttgttttttgttttttttcctttcgaatggcaagatgtaagtttatactcaaccctgggcccagcttttcagtttcactctgcatgaggtatgatgaaagctaagaaggcctgccctctccagggaagtggcggctggagcagccacggtgtcccagggcgtggcaggcccagccaatacgcacgcacaggcagaatggggggctgttgctgctgggttagctaccaggtgggattggccctggccatcggctcagctgcatggatagctgtggacacatcctgacatagcactggccgaggtgggaggtgagcttgggccgttctgggtcccgatgcctcctggctgtgcagaggcaggtcgccttcctttggccctgttgaatgagtacagctctaactgctctggggagtgggagggtgaagtggacccaagagctctcactctgacctccgtggcctgtctcgtgtcactcgcatgacccatcctcctgttgtatccctggacccagccctccctggcctccaggagcagggagtgataggcatcaaggtggtccagtttggggttgaggcgcagcggtccagaggctggcccaggacacaggctcacagaacccagtctggagaaccaaaggggacttgctgggacctcctgccctaggcaagagtccccagagtgtctcactgaccatccacatgccactgtttaaaaacagcgttattggaatgtaatgtgcacatcacagaattcacctattaaaaatatacaattcagtggttttagcgtacgtgtagggttgtacatctatcaccacagcccaagtttagaccgttttgatcaccccagaaagaaaccccatgcccgttcacagtcgttctccattttctcctccaccagtcctaggcaaccacgaatctactttctatctctacgaatttgcctgttctggccatttcacaaatatggaattgttcaatatgtggtcttttgtccctggcctctttcactgaacacgaagtttttgagattcacccacattgttgcatgtataagcaacttcattcctttttattgccaaagactgtgccactgtatttcgtatcacccattcagcagttgatggacatttgggtttttccactttttggctagtatgaataaagctgctatgaatagttgtgtacaagcctttatgtgacatatgtttttatttctcttgggcaaatatctagagtggaattcctgagtcatgtaactctatgttgaacattttgagtaactgccatgccattttccaagtgattgtgctattttacattcgcatcagcattctatgagggttcttgccaacacttgttactatctgtttatctttaacattacagccattttagtgcaatggtatctgagtgtggttttgatttgcatttcctggattactagctgttgggcatctcttcatgtgcttattggccattcccgtgttatctttggagaaatgtctgttcaagtcctctgctcattctaaaattgggttatttgtcttattatgagttatgagagttcttttttccaaatacaagctctttatcagatttacgatttgcaaatattttctcccagtctttgggttgtcttttcaccatattgatagtgttattcatttatttatttttgagacagagtcttgctctgtcacgcaggctagagtgcagtcgcatgatcttggctcactgcaacctccacctcccaggttcaagtgattctcctgcctcagcctcctaagtagctgggattacagacacgcaccgccatacccagctaattttgtattttcagtagagacggggcttcaccatgctggccaggctggtctcgaacccctgacctcaagtgatctgcttgcctcagtctcccaaagtgttgggattacagccgtgagccactgctcccggccgacagtgttattttaactccgaaagttttaaaccttgttgaagtccaatatattactttttttctttaatggcttgtagtgttgttgtcatagctaagaaaccattgctgaacccagagtcggaaagatttaccgcggtgttttctaggagttttggttcttacatttacatatgtgatccagtgcgagctaatttttgagagaggtccaacttcatttttttttttgatatctagttgtcctggcacgtttgttgaaaagacagtttttttcccattaaattgtttttgtgccattgtcaaaaatcaattgatcattaatagagggggttacttctggactctcaattatgtcccacttatccatatgcccgtcctgatgctagtaacacattgccttgattactgcagctttgtagtaagtttggaaactgagaagtgtgtcgtccaactttgctctttttcagaattgttttgactagtctatattccttgaattgccatacaaatttttagaatgagtttgtcagtttttgcaaacagaacaaaacaacacagccagagaggtcagaaatggtcagattctggtgagatttagaaaataacattggcaggatttggggccaaggatgaccctcagggttctggcttgaggagctgatgactgaagaggggaagaggaaaaccccacgtcacgtaagaagcagatattgtgggcagcgaggaagcaaaaaggagaagccatctgacatggggtggccgggtggccaggaggagcctgtacaggtgaccgacaaggtcaggggcgagtgtttgccacagaagggggtgaacagacacgcaccgcagtgatgtctagtgggccctcacgtgccctgtgaacatgaagccgcctgttgttccagtagagggatgtgggtggaggccaactgtggtggggagtgaagcgtagttatgaagcaggaggagatggagagggggctgggcaggggcgtgaggtccaaagagactgtgtttttaaacatggatgcctcaagccagttgaagagttgggaagagtagttcaatattccagaagaatggagggaagagttgatattcctgggaactttcattgacagtgggaaggaggtgggtataaagtccagatggacaagctggctcagcagggaggcaagaccccatctcctgtgctggagacggaggagggctgagggggtgcatgggagaatggaggtgtgggctcctctcaagtgactacccttcccctctttgctgaggggcaggtggtaacagctcctggccccaaaggcagccctagttaccagagatgcaaaacctagtgaagactgaaaacatgtggctttccacacttaccacctggcctctcactcagtcttcctgttattttgttcttgttttcagagtggggaggttttacacagtggaagggggtcaggttgccagggctggagtggatcagagctaactgccacagggactcccatccggaggcccaggggatgcaccatgggggcaggtgggctcaggccagattccaggctaccgagccagcatgaaaacagccacggtcgcccgcagggggtcccccatggggttgtgcgtggagtggccacagtgccagtgcaaggaggaagtgtgtgctggcagtgggtcagccggcagctggggtgttagctctgggacaagggggctctccttgccatgacgacagaaggaaaccttggggtaggccagcagcacttcctgggaagagcccagcagagcactggctctcagtggaagcgtcctgtctggggcctgggtcaggctggtctccagtttgcagtgctgctgagttggaaaaagagggcttcattaggagaagacagacggggggctacagctcagcactgcacatctccctggcctgtgttggagtctctggccagtgaggggtggttccctctcctctggacctttgtgcatcaatctcagctgaggaggccctgtttgtttcctgagtttttctgcccacaagagccccataaaagtgagtgtggggccaccatggggacagatgtgggggttaccttgagcaggcaggactccaggtgcaaagatgccgggtccctagagaggggtcccagccagcgccgccctctgggtgccgggagctgatcccgagaggcttgttttccaggagacgtgctcaggatggagcggtctctgatgttccgtttcccattcgcatccacgagcagggattcagattaactcactagaaactcaataacccaagagaacaggctcgtctggatgaaaacctccacttcacttcagattcctgacaagaaaggccatggtgatgacaacagcactgacgtcctcatgggttcacttccaggctccgtccacacatgtctctccatctccaaataattcttcccctcccactttgtgggtgaaggacttaagtctcagagagggtagtgacctgctgctcaggtctgagttggtggcagtgccctgtgtgagctttggggacccttgttcccaccacagagtgtccatggagcagcatgacttctggaagggcgtctttatggaacacctccacgtttccgtggagagatttcctgtagcccgtggccccggcatccacgtttccgtggagacttttcctgtagcctgtggccccggcatccacgtttccgtggagagtttcctgtagcacgtggctccggcatccacgtttccgtggagacttttcctgtagcccgtggccccggcatccatgtttccgtggagagttttcctgtagcacgtggctccggcatccacgtttccgtggagagttttcctgtagcctgtggccccggcatccacgtttccgtggagagatttcctgtagcccgtggccccggcatccacgtttccgtggagacttttcctgtagcccgtggccccggcatccatgtttccgtggagagttttcctgtggcacgtggccccggcatccacgtttccgtggagagttttcctgtagcccatggccccggcatccacgtttccgtggagacttttcctgtagcccgtggccccggcatccacgtttccatggagacttttcctgtagcctgtggccccggcatccatgtttccgtggagagttttcctgtagcacgtggctccggcatccacgtttccgtggagagttttcctgtagcctgtggccccggcatccacgtttccgtggagagttttcctgtggcacgtggccccggcatccacgtttctgtggagagttttcctgtggcacgtggccccggcatccacgtttccgtggagacttttcctgtagcctgtggccccggcatccacgtttccgtggagagttttcctgtggcacgtggccccggcatgttgtttgggtgcatggggacttaatgtgctgctagagatgctgattgagcagagcctacagacaggagagctttgtctggggtggagcctactgagcccatggggcagggtttggccatacacaggccccagtaggggaccaagagggccacaggagaagaactggcataccttactgggcttctagtagtgatagccgtttgctgccaagacatttcctaggagagggaggctatcatgtcaaggttgagccgggtcctcaggcccttgtaaaggagggtctacgcttgggggtttgtggttacttgtgtgctctgtacccaggggtatggtgcacaggtttcaccgggtgccattctgctcttttgcccagagaagctcagcggctttgctgcctcagggaggcaggagtggctctttggaggagcagttgatccccgggatgctagtgctctgcctgagcagatgtggggcctcagggcctcaggacttcagagcccagggctgactgacctagggacaggagtgtaagggatgtgggcaacgaagaattccacagggctgtatttccagactcccatgggtgggtgtgggtggagaagccccagtgagctggttatctcccaccaaacaaaactggaggtccctttgcagagactcttgcagttcatgtccacatgacttctctgagaagcaggagagactcagcgcagaactcaggggagtcgcactcgggagaggcagcgtctcctctggagcacacagaccttatgtccttccctccagctgtcagccagacatgccccagttgtcttgcatatatacatatgtaatggtaacaaggaattctgcttgagccttgccaatcagcccagtgagcaggtttctgcagcatcttgtctcctgggatagatactcagaaagtgaaccctgtgcactttggggccttgtctctcagcttctgttgacacataagaaaagagacacacagaggaccccacgccccatcttcaaagtgtgaagcacactccccggctgatacgattcttgtcgattcacttacggaatcttccaatatgcttttcctccctataccccacatccctgtcacagagttgagaattggattacctggtgggcaggtgggccccagttagaggccgctcacaccggctcagtgcagatgaccagtggcagatgggaacccaggaggcctagagatcttgggtgatagggaagctcccgcagctccctcctcactagtccaggcaccggagcctgcggtgggagccctgtcatctcagcgacggcctgcgggtgacttacagctcaatgaggggaggcacagagtaggtgcacacagtaggtgccgaatctgagtggttttattcgttcctctgtagacctcgtattaggctgtctccttgactaccaaatctgctttcctctgtgtttatgctctggaaggtaatccgaagccctttaatgggatggaagcatttccagataagaagagggtgctgtggccagaggcacagggctgcctggggccaggagtggccagaaccctagagaagaattgcatttggggatgcacatcaaaaacacgaggaaaagaaagaaagtgggtgggaatagcgtgccttcggcagaatccaaactcacttccaaggcaaagccagggcccaacacgagaatattcatttcctgtttcattgttggttacttaatgaccttcctttgaaatgctgcagttatgtagaaagcaggttgtcatggaaacggggagtgacgtgcagggaataggtacacaatgcgtttctttgtcatgtccagctgatgcgttcagcctctgctcagacatgggaatttatgtgaggaattaaatattaactggaggcattgccctggagagaggcagaaacacagggtgacaaaagatgctggaaaccagggcaaagagcatgctggggcccccgggatcctgcgggaggcaaagctgatttgagaccatgggtggatctcactttcttcaatcaatgggctccagagaagtcgtgcaaaacaatcttctttttcaaatgcatatgtactgtgcattcttttgaggggcagaaggatctggttgtaatgcgaataattactcattagtcagctcattttcaaagttggaggggtgacatgccaagttttctcaaggtggctctcagctgccttgtcccagcactctgctggccgtggttgtcagtgggaaccaacacctagagctgggacaacagtgcaggggactgcaggaagactccagggaggccccaagtcagagagaaattgtctcttgttcctgaagcagccatggagccatgaccttgtctgtttctccggtggattccaggaaataggcattgaatatatgatgttaaaaaagtgcctcaagtttctcactttctccccttgagccagcacggctggcacccaccaagctttccttttctgaccttgaacctttttaaaccctcagaaaatgagttccgaggtgagctgttaaatcagaggtggacacacggaggcaaggccagcagctgcaggacctcaagacacctgggcagacactgcaaggtgagacgtgagagggcagcccctgtcgtagggccccaccccatggctgcctgcacaaagcctctcttcagctgcaggcatgaagcatggaggcgacttttggtctgatcctcaccagagtccgggttaggtgaagggtaaatggggactaggatcagcaatgatccggtcactttaaaattaagggaagaaaaatgactctgagtagatcaaaactaaaatgtgaccccaggctgggcccggtggctcacacctgtaatcccagcactttgggaggctgaggcaggtggatcacttgaggtcaagagttcaagaccagcctggccaacatggtgaaaccccgtctttactaaaaacacaaaaattagccgggcatggtggcatgcgcctgtaatcccagctatttgggggaggatcccagctaaggtgggaggatcacttgagcctgggaagtcaaggctgcagtgagctgagattgtgccactgcactccagcctgggtgcagatcttatctcagaagtaaagggactaggaatggtggcttttatctctaatcccagcactttgggaggctgaggcaggtggatcacttgaggtcaagagttcaagaccagcctggccaacatggtgaaaccccgtctttactaaaaacacaaaaattagccgggcatggtggcatgcgcctgtaatcccagctactggggaggctgaggcaggagaatcacttgaacctgggaggcagaggttgcagtgacccaagattgtgccactgcactccagcctgggtgacagagcaagactccatctcagaaaacaagcaagcaagcaaacaaaaaaaacccaccaaaatgaaaatgtgaccccagagtctcacttccttgctttgaggtgtgaccacgtctgggctctgtgataggcctgagcaactgttctctattcaccctgcttttacctggccaggctgagaatccctacaggatctgacagcagagattgctggcaggagcttatgaagtctgttggccttgttttatttcgatcttcctaaggggaggcagatggtgcaagcccttcttataccttcccagggtataagatctcccttcggggacactcccgaactgtgacatcacatgtgcttacagccactgttctccaccaccaaccctctaattctagaacttcccaccaatactctctggatgaggccaggtccccagggtcaggtgaccctcacagctggaagtagaggctgacaataggcttaggctgaagcccttcccagagatccgattctgacctctcttttttcttttttgcatgtagatgctctccagcaaggatccagctgtgactcagggcatggctcaaggacagtgatggcgtagggtgtaggcaaggagggctatgcagttgtagtgggaacttcatttgggggtgcttgtgttttactctcaaaacccaacctttttcttttgaatctggtggcgagaatgtacattttaatgggtctgttatagacaacttgctgagcacctccgctcatattttggctcccgcaggattatcagtgctctgctgatccatgttggagcctggggcacaaggaagagtcagtaatatggatcctgtctttatttaaggttttggtatcttgtttattaggggttttttgcatcatgttgatgtttctaaatattgaattaaaatattatttatcttgatcattgagtttttggcctcattcccctcaccctaccccagatcctgaggattcacatagcgctgtactggcatgagatcatgtgagcatgaacgttacttgacttgaggccaggggctctgcatgcagcgttatctacaaatgtctggtgccatgtcaggggtgggtcggaagacttttgtctccccctggcccagacatgacaaactcagagagtttgggacctaccatgacaacccatggctgttcaaagtgctgcttctgtgaacaaagccagggacccgtgcccaggttctcgtggcatcaccagctctttcatcactgctctgtttgagggtcatttcccttcttttcttgcagatagggccgagtgactgctctgaatagagaagctaagatgaaaagtgtgccagagaaggcgagaggatgagaaagggtcgactgcctagaggacagtggggcagcaggtgcaagtagaatctcctgactaagaggctgaggagggtggcagcagagggcataagccgtggtcacagtgtgagaatgtcacacagccacagcagcatcggggtcagccttccagaggctggcttcggacaggagatgggtggtgaggagccagcatgggagggcagtgaacacacaaaccctgtgcatgggaccgtcacagcctgcggcgtgcctctgagttcagcaccaggcatgtggacagctcaggaccggttggaaggggctgccagaagtcaggtggtcgtgtgtcggggtatgcaggagctgatggtagctcctcaacccccttcttgccaaatattcagagatatggaatcaaggaaaagatcagttgcatggccattcagccaacccttcttcctgccacccagggcaggaggtgcctctggcaaggactactggacagaggctcctgcaagggaaggagctgccactgggtatggcccttctggcctctctttatgttgttggattctaccctgggtgggtataaattccatttatgctggagtttttaacagacggttgcagatatggctgcttcatcagggtatccattatgtagctctaatttttgatttgggaatgaagtgagccagtatcccatgcttagagctgtcaagagaaccccttctcagacatgtgttaaataatgccccatggaggtgtcctttctataccccaaggaggaggctggtctattctgctgaatttgttgggagaatttcagaatttcagacatgcaacaggacatcacccaatgtgaggacagaactatctctgcaaggaaccaagggtactgtgatggctgccagtggggatcaggggtgagggcatatggtttagcctcagagatcaagagagtggaaagcaggatgtgtgctgaggtcaccgactttctatatctgttctgtgggctgagctggcaggcaggtccatgcaccaaagaaagggaaggggagggctgtggatgcagcagaagatcctcctgggatactcgggaggggagcaacacaaatgcttgaatgctgctcttagatcgttgagtgggagcttggatcttccacaatactgtctgctgtaatggcttcacagcagtgacagggaagttgatgctgccctcagtacataaatgagagaagaaaacaggccagaccatggctctgtctttctcccctcccctcactgcagagaagtgagactgaatgtggtgtgaggtactgctggagccaggcagggtaggggacagccagtttctggccacctcctcaccccccactcttcactggccccttccttctgggaagtggctgcctatggtccgctgggactcagcaggtgctcttcctcttcttctaggtctctgggaggaaaaccattatgcaagaggctcaaccgtcccaccgagacactataacctatgtaattttatggatttttaaagaatagttgtaagtccattctaattctccagatttgctggctgtcagaacacattttaaataaaataaaacactaccgtgtctccttctctggcccagcgctggggtgaatggcccccgtggtgtcagaatgcccggaaccccccagctcagcgttcccacatatggcctctctgcagcccctctgaccacggctctccacacaccccagccccagggtttcagagatgtttctgactgtccccatttattcattcatccacctgtccatccacccatccttaaatgacatgcactaagcagctgtctggaggagagacaatgaccttacaaccatgaatgaatgagctcatttcagattgagatgaggactgtgagggaaacaaacaggcacaaggtggagactgagaggagctgggaagaggcagggtgctggccacctaagaatgctcccagctctacctctggagtgcctcccaccccagatgtcctcaggtcactgatccattcaccctccccatccctacctggctctcaacccttagcagagctctctgtttcttgaactctcccctgagcactccctgcctccctggggtgatgtacaaatcttggaatgccaggctggtgcccctcagggccagaacagctcctgctggggccaggacaccctcctgctggggccaggcttcagccaggattctgtcctttgactggccctgggccattggtgcagaagggatgtgatgggggttgagggaggaagctgttcagctctgagggccctgtcctgggaggaagcatgaaaaaggaatgaaagaggcagagagagacagagagggagtccgtgagtgagtgaggagaaatgggtaaccctgagctggggcccgggaaggagtggggagacgcagcctctgggggcaaaggtggaagttggcacaaagcccgttgggcttcatggaaaatctccaaccctgatatctttggaagctgagtctaccatttccccttagaggttagacacgagtggtttgttactggctatgtgtctgggttcttttcattttttattttttttgagacggagtcttgctctgtcacccaggctggagtgcagtggcgtgttctcagctcacctcaacctttgcctcgggggttcaggtgattctcctgcctcagcctcccaggtagctgggactacaggcggccgccaccacacccggctaatttttgtatttttagtagagtcaggtttcaccatgcctgcctcggcctcccaaagtgctgggattacaggcgtgagccaccatgcccggccctgtttctgggttctgagtggatttgttacagctgcagcctcagcgcagatccctctaggtttcaagattgcttactgcattggcttgttttggttcctgagtttgtaaacacccaactcagggcactctgttttggccaggccagcatgcagatgagtctggaaaaggggctggtcttcgtaccatgtcatggtgagaactgtgtgtgtgtgtgtgtgtgtgtgtgtgtgtgtgtgtgtgtgtatacttttttttttttgagacggagtctcactctgtcgcctaggctggagtgcagtggtgcaatctcagctcactgcaacctccacctcctgggttcaagtgatcctcctgcctcagcctcccaagtagctgagactacaggcgtgcaccaccacacccaactaatttttgtattttcagtagagatggggtttcaccctgttggccaggcttgtcatgaactcctgacctcaagtgatccacccgcctcagcctcttaaagtgctgggattacagacgtgagccaccgtgcccagccagaaccatgtatattttcaaaagagcttacatgattaatcctgactttactaaacagaaatataaaacagaacaaagcaaaaacacacttttgaggagactgcttttatatggcactaagaaagcaagttaaatggatggacaaagagacagttctcttgggttaatttggcaatatacaatgtatttgcatttatgaattattctcctccccacagttttcatggttttcctatcgaaggcagaactattgaaatattaattagagcctcaagacatgctcgcagtggcagaatgaagctggcatttggagaaacagagcagacgttcttgagaaaggttgccggcccagcagtaagagtgggtgatggggtcgttctgccttttcactctcaaggggagaggtcaccgggctatctgtgggttgcgcaaaaaagggacctggttggcttgtgtttggaacaagtaaagtgtgttttaaaaatcaatgaaaaattgagaagtgtttaattttctttgcatcattgagctgccctttagggcccagctgtcattgtgtggtgggggcagaaggtctggggggctgccgtccagggatcaccaaggtgagcctgggtggtgctgggcacagggccgcccccagcacccgctctccatctaccacatcgtggtgccgatcttgcggcaggaggagagcagagaactcacctctgaagtgctttgacttctttcgaaaagaaaagtgatgtaaatcaagcagtgctggttttgtccagatgctttcgcgtcagccggcactgctgatttcaaatagctcagaaaccagtgtcccaagtcacccagctcttacgggttcattctcgtattaaagagcctggtttattttttcttcggtagttcagtttttttccctttaaaaatcaaagctacacgctcctaagagaacttctcgcttattgaccagtcaatgcagataaattgcaaatggtaaaaaggtgctcagcagaaggagcggcagagctgtcagcttcatcaacgggagctcacagttttcaagcagtgcccattacacatccctgcaaccctctctattctctgctctttgaataatttatctgcaggaaatccaaattgccaaggcacgctttaacctagcagaatgcttgccaatatccttgggaaaactggcaataaataaataaataaataaagccgtagattgcatttcagctgagtgcaggcaccgcacaagtcccattgtacgtcctgcatcggaaggcattgcacacgggctcagagcagacgacatttgaaggctcataaatgtaatgaagtccctgtgacacctgctcctctattcactttaaatgtgagccatttgtccatggggaacctccgctttaaaaatagaaattgtagtaattgtcttccgttctattggaaggctgtaataaacgcacggctcacagcactgtgctccacagcctggagtcggcaggttgcataaattacccaggttttgatttttcttccttaacaaatcacatacatcattgtatgttagtgctgctgcatgggggaggttcaatttgcaaatttcatcttactaattgggggaattcctttttctttcttcccaggtggttctgtagacatttgtctctttttctggctttcaggagcaaaagccccatttaagacgtgggggcttctgagccccctcctgctgcctctcttcctttcttctgctacttctttccactcccctgctttccctttgactacctcacgcatagagccctggcagctctggtgtctgtggcctgggacaggtgtggatttgctgcctccccttcctgaccacaggtgatggtggtggagtccagtgctctcctcttgggcctcccctgtccggctagaggtgccctcccccgcctggtgtggctccccgggaaggatgttttgcatagcatggagtgtgtaggatttacttgcctgcccagatttgtcatgagtgacacaggacaaggatgctgtgtgtgaccctcaccactgccccacatgtcctttctgtgattgtcaccctcctgggggctcccccatgactccctcgccggacaatgctgtgggcagtgtccccacagagggtggtcagattcaaggatcacaggtggggagggacaccgataggctcaggcaaggcagccaggccctcgaggcctggagaacatatgggctggggccgctccaggttgcctgtttctcacgggatgaccctggtgcgtgaggggcattaaagccttctgctgggccgggcgcggtggctcacgcctgtaatcccagcactttgggaggccgagacgggcggatcacgaggtcaggagatcgagaccgtcctggctaacacggtgaaaccccgtctctactaaaaaaatacaaaaaattagccgggcgtggtagcgggcgcctgtagtcccagctactcgggaggctgaggcaggagaatggcgtgaacccgggaggcggagcttgcagtgagccgagatcgcgccactgcactccagcctgggcgacagagcgagactccgtctcaaaaaaaaaaaaaaaaaaaaaaaaaaagccttctgctgtagtgggaagaaagggcccatgggaagctgtgctctggggacacgttggggtcagaagccactggacgacccagcactgccgctggtggctgagtctgtggtgagcgacctgccctgatgcctcagcacctgcctgaccaggtgagcagtgggtgctgctctgtgtcgggccaggagaccctcttggataacatacggacattcatcaggcttcagtggcgcagggcccatgcctcagcacttgttggcaggtgcaaacctgggggcacggtgcactgtaccctccttgccaaggccggggacatgctgatgggacacttccaagccttgtagaaggtcctttctctacaccctcccacctgctgctcctggccccaggcctttcttgtcctgtgagcccatccttgtcattctgtgcccaaaatcacctttgctgtcaaagcttgagccagaaaatggccagacattcctgatggctctgtactccagaggcactggctgggttttcttgttaacgtcgtggttttttgcttgcagatgagcttagaaaatgaagacaagcgagctcgcacccgatccaaggccctgcgaggtgagtgccgccctcccctcctccagggctgtaaatgccactttcctccgcggtcttcctcaggagcacaaacccctaaccacacatgtgcagagatgccctggggacctcaggcctcttcagcctcattcatcctcagggctgctgagctttgaagctggcatctaagagggctgctgaggggcctttggcccagatgaacctgccttgagggcagaaatgttgaggtagacccagctccatggagtgggagtagcaaggctcagttacgagaccattctgtttggaaatgagaggccgccagccttccaccgccagcccccttccttcccaggcgatcagtcttggtgctaatggggcataggaggttgttgggttgagctggaagtgcagtgggaggagaggaggctgactctgttaggatctgagccccaacccctggccagacttacctccctgatacgggcgggggcttcctcttgtgcccaagcatctcaggtgtgcctgccccggtcagagccccgtgcatcttggcagccatcactgaaggaccagtaactcggtccagttgttctcttctctgtccagcttgatctggtggtttgtgtttcctgccaaaagctgacttctatctgcaattagagaaagagataccatccctggccctgaggtcccagagatcctgtctgaggtggagcatctgtcccactttgtaaaactgccaggctgctcaggggagcttctgcggcgagcaccaggcttgggggagcagctcactctgttgaccttggaggactctctgggaggtcaggaaagggtgagcgccctggggaaacggctcaggtctcactgagatttgcctccactcgtccttggcaaacctctcggctgtttaacttagtttatgctgttagggcaatgagcctttaaaatcacaattcccacatgttttccctgtttctgtctttttcccaggacccccagagaccacagctgcagacctcaggtaaggaagtcttcctgttagcaccaagcatcgtctatgtgcctgtgaccctggagatatcctaaatgtcccaaacggggtcttcttggattgaccaaacacccctggtgagcccctgctttccctaaggagactgcctttctcctggccacgtgtccagctatcttggccccatctctatctgttctcacctctgtcctggccccatcatgtggcgcaccagcatcatggcaaggacacggatgtgcctacacctggtcaccacgaggacctggactgtcactgcggtcccccaaaccgaaaacaagccgctctcttaccggaccctcacaagtgcttctgtgtcagatggttggaggcccagttcggggatgagatgagagaaggggtcttctacatcctgagtcttccattggctcgggatgcaaacagcagttctgtgtgctgatgacccggctggctgagctctgtgaccgtttccttcctgcttctcagggatacagattctcagggcagggaccatcttactgttcagcatacaattgaagagtggatggcttctgccaatcaggaaaatgagaggactgcaaagttcactttgtaaaccttttgcagaggtgggacaggaagacagtgtccctctgacacttgaggccccgtaacttggagatgaagggggaggactacgggagggagttggggtgctgcaagccccaggctctgcgtcagtcacacatcacagtcttgatctctgggaaggtcatggaagcactgcctggtgatgttattatcctgtttgtgaagtggggaaacggactcaggggttaaccttcatctaaccagaagagctgaatcgcatgtgctacttgctggaagccccaccctgggtaacaggtgggaggggtggggtggaagctcagccaaacaggtcgtgtgccagcacttccggtctggggtcctcagcatcacaccgggtgctccccagaacacagtccccggaagcacaggggtcggctccctggaagggagacattgcctgcttggccagcctgctgaagaagcggtgattgcgacggcgagagatgctcagaaggaccccgagtaaagggaagaggaggtgccacgtggagtcgcccagggacacggtggagacaaagacggaggagaatcccaggcgagggtgcagtgagtgaggcacaggagttgaggaaactccaggcttttttggtaacagatggagtgtggaggaagtcgaaaaggcaaatacaaatggcagggtgctctcttgtagctttgaaacagcagaaggaaaagtgactctcaaatagatttgttcgtttttaaacattctgagaggacctgtccagtctaagtgaggggttctgtgagcatttggattttgacgccctcatcatgagccttgtggtctcaactgacatatttggtaatagtgagacccttaaactttttaatggagaaactaggggaaatgtgttgacatctagtgttccaacaataatttcttcagcaattcttcattgctaacatgcaatgtgatgcttagagtaaaataggacaaagattatgttccaaggaatcaaatacattctgcacggaaggtaccattcattcctgtattctcaaacatctgttggccacacgcttcacgtgggcatgcctgtggctcgtgctggctgactgcgtgccccagccatcgtgggagcatttacaccacagaaatggactgatgatgttccccctcccagagacctgtttaccagcacacgctgggctctgaccggacaagcagacgagacctctgtcctggtgggggccacaccgtgggtaccagaacaggaagcatgacccacgcagaaaacgcaccgttgtggtctgtgagaggagcatcgcgtcctgtgtgcagaccatggcactggatgagctcacagacacagagtcacctgtcgggaacccccgtgtgtcgggaacccccgcgtgtcgggaacccccgcgtgtcgggaacctctgcgtgtcgggaacccccgcgtgtcgggaacccccgcgtgtcgggaacccccgcgtgtcgggaacccctcgcgtgtcgggaacccccgcgtgtcgggaacctctgcgtgtcgggaacccctgtgtgcaggactttctctgtggatgacttaacactgcattggctcagaacttcacagcctgcagtgcccctaaccccagctcgcctccccaccagctcaggcagagctcccaggaagacagtccattggttgtttaccaggtgagctgaggagaggttggacttggatcgagcaggaccctgagctgctatttccgacctcggagcccactgggagtgcctgagcgaagaagcagtttgatggtttttcctttcaccccatcgggagaactgatgacgtttcagcttgtatttttgcctgggtccatctgttgtcacatggcctcagactggctctgccagaggcgaagactagggaaggttagggttggggttagcatctttgagacagcgaggcgctgacaacaccgagttcaggaccatctccaagttcagagagagaacacgtctgtagctcacccttcttcttctggcgccttcctccttgagccactggccaactcccacccagatgactgccccaggagagggagggaaggcagggaaggcagtgtcttcaaaggctagtagctgaagcatggggctccaggctgggattcagttcctctcctgacttgtctcctttgacgcctacttttcaagtttgggtccctcagagctgtcatgcaggatgccagctgaggggtgactgtgggccacaccctcttcccagcctcacgtgcatcctttcctcacatctctgacaccagccctagtcagagctggggagtcaaggctggggaattccctcctcccggagaaaagaggctcgggagtcctggagccctggccgtcttcctctccctacaactctggccctgagcacccagaggacatcaggaaataagagctgagtgtgcttgcaggtgaactgcagggctggcatctgctggcacgacacccttggaggccctggctgggtctcttgtccactcggctgtggggtggggagcaggcatctaaggggtttccagcttcctgtccccgagcggccttgtccgctccacgcacttgggctcacagccgtgtctcacaccctctgaggctggggccggaaggtgcaggcccaccttcctggggaccaggactcttctgagctgagggtgacgtgttcagggcagtccggtccccacaggcctccacagcagctgtcacctaattgcctgattcactcagtgatgtcatcggctaattgggaccttagcttcaaatccccattaacaaggagcttttttgtgaaaagtcccaaagctagttctccaaagagtgaaagcaagtgtgggcctggattttagaagagactagaggcagggagaggtgggtggcagcggcggcaactccctcagtttggaaagggagcccccagtcgagtgtggtgtgccctccctctctcgctctctccctcttcctccctcttcccctcccttcccgtctgggttccctcttccctcctccctccctccttccctccctctctgtcttcttgttaacacactgaaaaccccaccctggaaggctgcagagaacatccccctcccccaccccatggctgctgttgagccaggggatagggtaaggcctggattctgctgacggttctcccagaggtagtcggggagggtggcctgcaagcccactgggccccacagttgtctgcagtcaggcctgtgatcagtcgaattagaaacgatcagaggtgtctggatagagactggggatggcgttcttttccccgggtcccaggtatgggggcaccagcccttaccttcctcccttcacaggctccggaagatgtgcttgggttttggaaagagctcagactcacaatgccagtcctgttaaaagcaaggtcttcccatcttggccaggaaagcctctctcttcccacaaggagcgcaggcctgcccctcccacctgccttaggtgacctggcacaggcgtctgggtcttacaatggcagctccttgtagtccttgagccgtggatgcatccgacagcccacaggagcctgatacatggtgaactctggccttacactccacactggcccctttgtgcctgaggctgctgtgggagctgtggtcctgccgccacgttggttggcatagtcagtactcatgctcagaagtttccagagcttcctgctggtttggttatatagggagacagatgatggttaaggaagaggaactcctgggtgtcctgccttgtgcttctagggtgagagatgcaggagggtcagtgtcaccccctccccaaactgcccttcttagcacagcccaaaagtcttccacgaggcagatgctgttggttcctggttcacgggccctcccggcttcttttccctgcgtggaagctgggacccacaccagctacaggcactggtgggatcttcaccactgtctgtggcttgggccacagattcctttctgcctgtcagtcctggctccgtttgctggggcacgaaggtcacagctggcagggaatgcagagactgttaccctcgagggccataggccttatggcattagtgatggccacagagaatgccaacttctgtgctttggacttgggacctctttagagaggggtgccgtgttcagggcacctcagagcgtctcgtgtccaagctcctggaaacctggtggcagctagtggaatgcctgccgtggggagcggtctgggagactctggcgctagaagtcttgctcttatgtatacacagtctttaattgaacactcgtaaaactgtaatgagccatttatttatttgaatggggcgagttattaattttcagcaaactgcaggcagccattctgaggtgaatcgtctggagacattctgctccccagggtgaaggtctgcgacaggctctgagatctgagcccatcgcctgatgtggccttgcctttttatttcccctcagctgccccaccccaggatgcacaggctcagggcacgtccggggcaagtactccaggcaccgaaggtaagaggacccttggatctcacggagattcctgggcggtagatttggagcccctgcccactctgcagatggagaactttccatctttttccatggctcccaaggccaggctgctgacccttctgcgaggcagcgacctcccactctagcgtggagatctgtgtggccatgggcgtgccatgtgggggaagacagaccatctgacctcccgcgaggcagcgacttcccactctagcatggaggtccgtgtggccatgggcgtgccatgtgggcgaagacagaccatctgaccccctagtgctgcactttgctttttttgtccgggttccctgcaaggactggatgagtctgtggggaagggagggagggaggaccctcgggaggggctcatggggtgtctgaggcctctcgtggccctagcctggtcctctccactgcctactcctccctcccagtttacagagctgccccctggccaagaagaggaagctggagggcgctgaggctgagcacctggtgtccaagaggaagtcacaccccctgaagctggctctggacgagggctatggtgtggacagcgacggcagtgaggacactgaggtgaaggacgcctctgtttcggatgaatcggaaggaactctggagggggccgaggctgagacgtcaggacaggacgagattcatcgccccgagacagctgaaggtgctttgtcgctctttcttccccgaataaagggcgcttagtgtggccctggagaattgcagcctgtgagcggggaggggctcactccgggcaagagaaagcccttcctgagaacaaggcatgtcttgtcccaacatgtgctgggcttcctgggagagaggtctgcccatggtgtttatggggcctgtggtgtgtttgtgtgtgaacactgtgtgcgtaggagagaggcaggacagacagagacacggggctggtgtgtgtgtgtgcagttgtagtgtgttttggcaggtgtgtctgcatgtatatgagagagacagacaaggctgtgtctctgtgtgtctgtaagtggggaagggaggatcttagactggccctctgttctgcctggccctctgggagacctgcctgggggcatgggtgagaggtctgcgttcccctgaggtactcacaggcagatgctgaggaaacacctcaggttgagcttcaggtgattgaggaccagatggagcctctgaagacggggtgcccggggaggccaagaggggaaggaggaaagcagacgagtcccccacttccttgtggggtctaccaggactgccatgttggagctcctagcccttggcaaaagtgcatgaagcaggtgctttggcccctgggtcccggagggaggggtctgtgcccctgagagccctggcagatctgtagagacctggggtcagatgaggcccaaggtccactccccccaccatccccaccactcacccagcactccccaagcttctgcagtggggaagggtctgagatggatttcagaagcaaagccagagagggtcctcaaccccagctcccttggggggctctggagtgagtgcgctgtcccgtggaatcaacatagtcctagatcccaggtagaaaagacacacattttcctgctttcttatcaagaagggcgtctggggttcagctgtcaacctgggcttggactttcccctccgaagtaggtggatggcagggcccattcctaccactgtgggacgtgctggcccaggtgtccttgctgacaaccctacggggcctgcatgtggtgagcacctaccatatcttagtttcgttttgtttttgttttgagagagtctcactctgttgcccaggctggagtgcaggggcacgatcttgatttactgcaatctcctcctccttggttcaaggaatagctgggactacaggtgtgcaccaccacgcccagctcatttttgtatttttagtagagacagggtttcgccatgttgaccaggctggtcttgaactcgtgacctcaggtgatccgcccgcctcggcctcccaaagtcctgggattacaggcatgagccaccgagcccattcttatttactgattttcaattatgaaacaattattattatttttttaaaatctgacttgctgcttaagctccattgtatacaatgcaggtttatctgatttgggaaagtaaacgtgatgggagaggaacattaagaaaaagtatcaaagtaattcttagtttaaaaaatacatcagtggcccatgacctgcctcctaaaatatattcaccgtgatttctggattcaggcagaagggttgacagaaaggtccataccaaatccccacttctggagtttcatgtttccccttggctcccgtataaagagtgagtggtaggtcaggtggaggggtggtgggtgtgttggggactggagacctggagtcttcccacgtgctctctggcccccacgttgattttgattttgtgcaggaaggagccccgtcaagtcccattttggatccaaccccatcggcagcgccactgcctcctccaagggcagctacagcagctaccagggaatcatcgcaacttctctcctgaacttgggtcaaattgctgaagagaccctggtggaagaggacttgggccaggcggccaagccaggtcctggcattgtgcacctgcttcaggaggctgcagagggagctgccagcgaggagggtgaaaagggcctcttcatccagccagaggatgccgaggaggtcgtcgaagtcaccaccgagcgctcccaggacctgtgtccccagtccctggaggatgcagccagtgaggagtccagcaagcagaaaggcatcctgagtcacgaagaggaggacgaggaggaggaggaggaggaagaggaggaggaggaggatgaagaagaggaagaggaagaggaggaggaagaggaagaggaggaggaggaagaggaagaggaggaggaagaggaagaggaagaggaggaggaggaggcagctcctgatgtgatctttcaggaagacacctctcacacctctgcccagaaggcccctgagctccggggcccagaatcacccagtcccaagcctgagtactctgttattgtggaggtccgctcggatgatgacaaggacgaggacacccactcccggaagtcaacagtcactgacgagtcggagatgcaggacatgatgacccggggaaacctgggcctcctggagcaggccatcgccctgaaggctgaacaggtgcgcacagtctgcgagccgggctgcccgcctgccgagcagagccagctgggcctgggagagccagggaaggcagcaaagcccctggacactgtgcggaagagttactacagtaaaggtagggctcaggggtggcctggccctgcagactcatcctttcacccctgccccaggtgtgcagatgcaggctgagagcccttctaggacagggggctgggggatggcagaaaagcagacaaaaggacaaatacatgacacagactgtggtcagatactgagcaaatgggttcccacactgctttacatagagcgatctggagcgagacacagcggagacgtgtgagaaagaaccaggtgggagagaggaggtgggagggacagtgacccacccacagtgactggtcacagcagcatctggggtctggagagggtggggaccgtcctgtcccttccaccccaactcacactcgtggcagggattgtgctatgacagaacccgctgtttcctacagccatgctgggtcatcctgatcctctcgtggggtggagaccagcaggcagatgtgaggggtgcccttgctcctcagagggagcagcctgccgctggctctgcatctgtctctggatttggctctaaagtgtgcagggtacaggggagccatcccctgatcgcacggagtggctgatgttgaggtgaggatagacaaggagggctgcttggaggggcctggggctgggctgacgtggttggggagcagctgggaagcagctgatgtggttggggagcagctgggagcctggagtgctgaggtctgaggacgaatcctgagtaaacggttacggccttcattgttactggggtgtcagggtctggacaacaggctggctctgctctgctgactgcccatctcagattcctcctgggacaggggtctggggagcagggctggccaggggctgctccctcagtgagccatgccagggaggccaggccttggacaggtcagctttgacccagccggcctggtgcggagggcctcctgcacctgggcacttggcctctattctcctaagactagggacctgccctgatctcggcctcttttttccccatgtctagtcctgcatctcttctccaggtggacgggggcagtgggagttcttggtgctcttccaatgagtgcccccaggaagagttagctgagaccagggagggagcagataaggagagagaactgggatgggagatgactcaggtgctggagccacgaaccaaaaatgcaggagacacggaattgccaaccctgggaagatgcacttgggtcatgggagagacagacctgagtgagacataattcaaggggcatgataggcaggtcagtggagacacgagggacatgttttccgggaacaccaggcatatgagacaagctcaggggaaagatgctaaggggacacaggtggggacatggtttcagggtgagatggacccaaagaatggctttgcggggacaccctttagggcaacccagatggcgggacagctctttggggacccagatttaggtcggcagtgtcatgctccggccttgtggggccatgggcacaaagagacacaggctgaaggtgagacttagggacaggtgtcaagggcccggggtggttactagcctggctgtggtgtgcttgggccgcacagatcagcgcagaatttggtgggacacatatgaggaacacagacaccaagtgacagccctaggcccaggtttttgagggtctcagacctgtgggacagacataggaggacccagatgcaaggcatcctgccttcagggatagattttcagtgcatggacccaaagggacacggccccgggtgacacaggtggccaagctgagaacaccaggcagtgcccagctgggctgtgagtgtctgtgcaacgtgaacgtgcggttctggttctgagggactgatgttggggcacagatgctgcgagaattctggacagaggccgtgggacaggggtggcaagcccaggaggccggtgttgggcacgggtttggaagcccctcaggacacccctgcctgtccacatgggtggaagtctgactcctttgaacttggggcagcagagcaagagctccttccctttggagccccctcctgggaccctcctgctctgaggtgggagttctgagtttggctctgtgacctctgcaccctcccaaaggggacagctctcgtccaaaggtgtttcactgagatgtcagctctgctctgagggtcctccgtgttcctgctggtccctatactctatagtgaccggcctggacctgcagaggctagaagaggtcgataactgagatttgggtttacatttctgcccaggcatagattagtcatgcagccttggataagttactcaactcctttgtcttcctcgttttgtcaaatcccaaggatatctcctggcaggaatattgccaaacgccttgacctctctaggcagaaggctgacccatgaggcctccacactgtcagaggagagaggaaagaggactccagcggccgtctgggttgttctccttaaaacgctgcacaaactgctatttgggattgtcagggcagcctcagggcttccgcacaggcagccagtgtgggctggtttcttcagggtctcctgactgtccagccccagtccctgttcaagctcatgggcagtctcgcctcccttctctctggacagccagagagagggttcctgagctacccctgccccctctctgctcaccacccagcttcctggctctaactgatgtgacttgtgtgttttagatccttcaagagctgagaagcgtgagatcaagtgtccaacaccaggctgtgatggcactggccacgttaccgggttgtaccctcaccaccgcagcctttctggctgtccccacaaggataggatccccccagagagtgagtagctctgtgcagcgttagccctaactgtgaagctcacgctgcctctgtggtgtttgggtggtgtctatggggaggcgtggcctgcccagggccataaccttcccctttggtttgtccagatgctcatccttacatctccccgctttcccccacaaactccctcagcccaaacttgagccctttgaggctggggccctgcaaccagcccatttgtctacctagagacgccagtccgggtcagagcccacagtaacagatcgatgggagggggacaggctagtgccatccaagctgggaagggagaggtcttcttgcagcaacctctgtgccctgaaagcttaggaagcaaatacttgttcttatgtttaggctagaagcagtaattgtgaaaattaaatttaaaggagcaaaccacagaatgagaggttttaaagctgagtctggtttctgccgcaggagggagggaccacagtggtggtggcggtggggggcatgccctgaccaggctgagggtggggagttgtgtctgcaggctcttgggggctggagctgccctgcgttgctgtgtcccccacctgcctaccaagcagcagcctttggacaaggctcctgcaccctcctcagcctgtgctccccacacagctggcgctccccagattctctgacagcctcggctccctccaccccctgttctcttacagtcttagccatgcatgagaacgtgctgaagtgccccactcctggctgcacaggccagggtcacgtgaacagcaaccgcaacacgcacagaaggtacttggactgagctgggccgtagtgggggccagggtgggggccgtggtgggggccagggtgggggccgtggtgggggccagggtgggggccgtggtgggggccagggtgggggccgtggtggggggctccacgtggggtagggcacctgggttgggcctgtgtgtccctgcctgggccgtgagcccgtgacctgggacggggctctggcctgcctggggctccctgtgtgctacccttctcccagcctgccgccctgaggagtgggtacaaggtcagggcacacctgggcggtgaggggcctttgtgagggcagagtggcaactggaggtgcagtcacccagtggtgttgctgccttaaccctacgagctcccgagagagcagggggcggcctgcagaggagggagcaatgcaccctctgtgaagagaggtacaacaaccatgtgagagccaggtgaatactttgtgtcctacccacattcagaaaacctctgcacactggctcttgctcctgagtgggaagggcagacatgaacagtaacctcggcaggccaggactgtgctctgggctgctttgtgggagttctgaggcccaggtggaagtgaagcttcccgaccaccctcgaggtgtagttgttgactggtcttctatggtgaggggggactactcctccagccttaccctaagtgccatgggtggccgtggcctcggtgggatatgctttcccccagcaggcttatgctcagctgaaaggactgccagagcttttgaggtcacttcatttgaaaagaggccagttccccattacgtcacctccctgggctggctgagggactggcgctggagctcacagttaactttattctgacagatgaagctgctgcctccgtgtcttagactgagtactttcctgggcctgtgtcatccagggtcagtgcccaggctgtggtccaagtggggccctgggctgccccagagcagctaacagaacaagcgccagagagggctgcagaatccagccctgcaagctgggaagggagaggaagggggtgagggcaagcctgtctcccagacccatgcagaggaggcatctttgcccagagctttcaaggcctttaggatatatttcatctttgtgtgtccttggcatagaatgttccaaaacagaaactgactgggcagcttgtactgtgagggctcaagaacagagccagagagaaaacccctgtcctgcagaatgacagggttattcccggctctgggcttctctggagttcacctggagttctcacatctgaatgaccttgccgtgagacacccacacacacagacacccaggacaggacaggcatggaggggaaggctcagaaacccctcctcttccttcctctagtttgtctgggtgtcccattgctgccgccgaaaaattagccaaatcccatgagaagcagcagccgcagacaggagatccttccaagagtagctccaattccgatcggatcctcaggtgagtgagatgagccacagaactgaagaggctgcctcccaaatgcctgcagagggcttctcagtctcccgcaggctgtatgtgcatgtgtgtgagtgcatgtgtgtgagtgtacgtgcatgtgagtgtacgtgcatgtgagtgtgcacatgccccgggccccccaggagcagaactgcggggcagttttggagccacacaggacagagtctcatgtctaccacattcgccagtgcctcagccaaagcgcaaactcctgcacagttgcctctgcctccgacatggggctctgcctccttggagtcgtctgatgtgaccacttgaggccccttggggattcatttgtggagatgctggtcctgtctggaaagagcagactgcaccagccaaggaccacggacgtccaggaagcaccatgagccactaatccttggccgtcctgcctgtccctccccgaccccagggatagaccccaagtcaaggaagagggtgggtgcaggctttgctccccagagtgctttgtggcccctgaggttctgagatcacagtaggtgtgtgtgaacatgtgggagcgtgtgtgtgcatgttcacacgcctgtttgtgtttgcatatgtgcgggtatgtttacatgtgcgtgcaagtccatgtgtatgtgaacacgtgggagcgtgtgtgtgcatgttcacacgcctgtttgtgttcgcatatgtgcgagtatgtttacatgtgcgtgcaagtccatgtgtgtgtgcatgtgtaaatttggctctaatcaataaggatctttcagaatgtgtcccattagtgtcccctccttccatgtggctctaagaagtaagtgccacaaataaggccagaggctcagagagttgcccaaggccaccctgcccatcctgcctggcttcaaagtctctcctctatggagctgagtccttggaccacggtacccactgtcgaagaggacacttccactgctcctgtcttcacctgcagacaccctgctccccactcccgtgaggaactagaactcacacacagctcctcctccccagctctcagacccctgttccatatctgtctcaccagacaagagtgtaggagaccccggctggggtgagcgtgaatgactgcatagccccttccactgtccgcctcctttcggggcccacctgaccccggcccttcctggcacataattggcaaagttccagccagatgatcttcgctgctcaccttggctgtgtcatgcccaggcccttccctggtctgctccagagtgttcctctgaaggtgcaattcccacacgtgggatctctgggcagagcacagagacttgccttcctgctctgtgggcatgcttgccatcccacacacaggcaccttcagccctgcaggtcccagcaggctgctttccaccagctggctctcacaatggtttgaagctgcttttttcctctatcttatttgctgttccctccagcttcctgtcagttgctaattcaatcctttccctctttgatctaaatcaccgataaaatgtcaaaccgcagatttggcccccgtgtgaggccaggcaggggtgtcaaacaggctccaactttggagactgcactccctgggactatgacctcagtttgttcacttataaaagtaggacaacaaactaagtcgctcatgaggctcaagtgacactctgccgccctcagcccatggtgaatactcactgaacgctagagagattgtggctagggtggaggaggcctcccgttaggcccttttgattctatccagcccacatttctggctatcgaactttggggtgtgaggacgggctttgcaaagcttcgttggcattgtggacaataagtgtacagattctgactgaagccttggtcaaggaagccatcaacggtggtaccaatgttaagcttattattattattattatttttagtgacagagtgtcactctgttgctcaggctggagtgcagtggtttcaatcataactcactataacctcaaactcctggtctcaagtgatcctcccacctcagcctcccgagtacctaggaatacagatgtgccatcatacctgcctattttttttgcgtttttttttttttcttttttttgtagagagggtctcactaggttgcccaagccggtttcttactcctggcttcaacagacctgccttggcctccaaaagtgcttggattatagacataagccaccatacctgacccaatgttaagtttaaagttagttttttccctcctggcctcactcttgcaacttttctatctgccactggggtcaggatccatcctggggctcccacccttcctggagaaggagaaaacacccacgtcctggtagtgttcagttcttccaggcccatcagagctggccgtggttgcagggctggcctggtggtcctctgtgctgggctctgttcttagtccacacttaagttctcgtagcacccagcaccttggaggctgtcattgtcagctccttcttaattccactgattgtacactttccagactgaagtcattgcttggtccagacaggaacaaagaaagccatggctgcttgccaggatctcctcttctctgagctgccaggttcagaagctcctctgtgcctgtgtggtcaccagcatctaccaccagtcttcctgcccctgtgccttctatgccagtttcttcgtgccatcttttgtgcatgtaaaatcctgaagtattccaagagcattagtggcagtgaactgaatgcttgcagtagctttttcgtggctgttgctgacccttccaacagttccttgagggtccacctcaacacagctttaagaagagggcagctgagggctgagtccctggctgaatgaagaagggtcaggcctggccctgaggccactcctcagaaatgcacctgatacaactagcgtctcctgtagattcctcagcttcctccttgctggggagttctaggttatgctgccttggagtgtcttgctattgtcctgggctatgctactctttggccctgcctgatactcactccagttgcagctgagctgtttgaaacctgctctcctaagttctggggaaaatcttaggccctcctctatctgatgctgtcagcaggacaggccattgattatttgagggtcctattgcttcctccctgcaggccattcttcaccggcctgctctgggagcccttgaccctgggaggtggaactctgcccagctttagtggtggaatatgcaggggtagtgtcttcctgagtctccttcctcaccagacgctgtgaggcccctgcctgggctgcagattggggttggggagggtggcacgggatccccaggtcccatctcactggctgtgcatccctgtactgcaccccaggcccatgtgcttcgtgaagcagctcgaggtccctccatatgggagctaccggcccaacgtggcccccgccacacccagggccaacttggccaaggagctggagaagttctccaaggtcacctttgactacgcaagtttcgatgctcaggtttttggcaaacgcatgcttgccccaaagattcagaccagcgaaacctcacctaaagcctttcaatgtaagttggggagaattgttcttgtttctcttctgtgttgctcctgggaggggcaggattcaaggggcagtggaggagggaccctctcgaggagctactagggagggaaactctaccctcatgggaggaccacgatgcaggctggaggtctcagctgtcccagtgggcactgtggtggctttcttggggcctgcatctcactcctgctgccaccttcatgttcaccattaacatttatgtgtctcctagttatttgtgaaacaaaacccagatccgttacgggcgtgtgtgtccaaagacttcagagcaaccccaccagcatggttcacactgggagacgccactctccccactgtcctcctgctacctgtttaatcccagtgcagccggctgtccatttcccagccctgcctctggggagggtcagactgtgggctgggtggggccagatgactgcggggctgggcccagtgccctggcaggaagccattgctctcctggtggggaccatcttactggatacaatgtgttatctgtgacattagtaacaaattttctgggtaattgtactgacaaaaatcattcctacaaatctttaagaacaatcctttctgtcttgtcttgtcacttactgccctaatttgtggaataagcccattagccctggaagtgcatgcgaaatggaaaagcattcagtgtacacatgagattgggagtggcatcgcggggcagatgttgtcagccccaaacatgacgtgacgagtttcctacatgagaataataaaagtactgattgatgcggctgccagtggggtgtgagcctctcttcctaactttgacagaacctgctctttaggatggaggacttcctgcctccaggcacacatgcctacttggatgagggaatgcaatggtgccagtggagagggggacctcacgataagctttccaatatatctagacctttctggatatactggtgacatcgtgattgctgagaacatcgtgcatgagagtgattttgcagctacagtacaattgctagaaaagataacattctgtgccttcatttgtcatgttcatttgagcaataatgttacttttttaaggcagtgatggttaccggggacaccaagtcagcctaaatatgggtacacccttttgagatcatgggacaaaattttcctatttgggcgatatggcaaacactcatcctattcacagaatgcttcagtttctgatagacaagttatttttgtttgaaatatcagggctgctggaatgtcttggaggcttttactccttttgcccaaattttcactgagccagaaacaagattgtctcctcagtcccctagaggagggtgggtgggagtgaggtgtgtgaggacttgggactgggacgggtggccaagcccctggcccacttcgatatagctgtgccctgggccctcccatccctcccaaagtgccccctccccactgacttgtctgcattgctgcctcttttcaagttgtatatcagcctggtgttgttccctttttgcagccaaacctttcccaaaggcctcttcccccaggcacagcccctccagtagttatgtgaggagcacttcatcctcttctgcaggctttgactactcgcaggacgccgaggctgcacacatggctgccactgccatcctgaacctctccacgcgctgctgggagatgcctgagaacctcagcacgaagccacaggacctccccagcaaggttagtacatctgccacagagcctttcttgggagaggtgagttggtggaatttgcagtcaggcccacctgctctctgcacaaaatgtccctaggaatggcttgtgcctagctggcaattctcattcttaactttttctccctcctggccatggccccaaggaccgcagagcttggatgggtccaccaggagaacctggtgtgctgagtgaagggggaccaagggctgcgaacacaagttcccacgtgttaggttgtgtgcacaccatgcgcccgcgtgtctccctctgagcctgagggtggtgcacacacatgcccatgtgtttccttctgactccagggcggtgcacgtgccctgttcacacgtgtttcccgcagtcttgtggttgctgacacactctccttgctcagaggacctagtcttacccgtgtttatgacatgtcctgagggactggtttttgtgctgttgggaggcaagaggaattgtagggcccccttcatgggaaatcaggaaatggcagctggattttttccctctcgctgcctgtctgtccccgttgtcctgcttccttctatgggaaccagtgttctggactctgtacgtttgattcaaatggaccagaaggcacacatgggaagggatggaatcgctaacagatctcacctttgccattgcagtctgtggatatcgaggtagacgaaaatggaaccctggacttgagcatgcacaaacaccgcaaacgagaaaatgctttccccagcagcagcagctgcagcagcagccccggtgtgaagtctcccgacgcctcccagcgccacagcagcaccagcgcccccagcagctccatgacctctccccagtccagccaggcctcccgccaggacgagtgggaccggcccctggactacaccaagcctagccgcctgagagaggaggaacctgaggaggtgggtgcaggcgcctgggcaagcagtcaggcggctgcagccagcttgccctgcctgaggctgttgtgatattggcttttcaaggaagcttctcctcacaggcttctggaagagcctcggggagccatcccttttcgtgaagggtccttcatcttctgagcagctgggactcaggggctcaccctctgggtgggattttcagcagcagggtcatgctgtgcccttgtctgtcaagaaggaggtggtcttctcacccctgtggagcatggtggccagcaccaacgtgggcactgtggaggcatggggaggagaaaggcatcgttcagatcccaggagttgattggggaaaagctcaggtttcttgggttttgagcctcccaccaccctgcagagctaacctgctgtccgggtaggggcagagccagtgagagagcttaggacctgggcttaggatcgcccatggtgggcagttctacgtccccgagaccaggaccaacctggcatgggtgctggaactgtggtctgggaagcaggggatccttccctttttagttccttaaaacatgtgaaagaagaatcctccgaggccacagccggttctgggctttttcccaaggaggtgtgtgtcctgaagagcaaagtccagctgtgagggcagcccagggtccaggcggcagcagccgcgtgtgtgagactagcaggcccctctccctctccttcccctcccccaaagcccctcaggaggtggaaggggtccctgtggaaggagcagggccagaccctcaaggaggaatgaggggggtggggctaggcccctatgaagggtgggggctggatcaggcccctatgaagggtaggggctggatcaggcccctatgaagggtgggggctggatcaggcccctatgaagggtgggggctggatcaggcccctatgaagggtgggggctggatcaggccccctccacaatccggcctcagtgggaggcagacttccttaccggccctcacaccaccctcaggtcaccccatttcatagacgagcagcctgggaacccacaacgaggtccaattatccgaagactgttattatgctgggctgtgggcttcacgggcatttcctcatttgacccccaaaaacctttgaggggctgctgttatctcaagttggacagagtggcacctgggccccaagagcctgagccacttgcctgggacacatgcgagtgcctgtcaggacaggattttgagctctggttacagcatcctgcagaatgttggccttctgacccttcctggacccctggcccctccgtgggagggactacgccctgcttatctgtgtccacagctctgagcctccatacccagcattcagttcgaagcctttatcaagcacctgctgtggtcaaggcatcgcactggtgggcgtgtcgggccaggtggtttcgaggttactgcgattgttgtaatttgtatgttattaccctcgttgtgccatctcatcttcatggcatttcggtaacacttatttagtgcctactgtctattgagtgccatccctggctctgaagggaactgtatcctgatgtttacgctgcggagtgatgtggcggagggaggccagggagggtgtcaggagcctgccacactgggcagcaccaggcctcatttctagggcaacgcaggacctctggctgaagcaggggagggatccagcccctcaggggtgttgtcttctgtgttttgctggggggagttaagtcttcctcccttatccagaagataggagactccgggagatgcttctgtggacactgtcctgaagggtccctctccctcgcccactgggttgggcgcccaggcctccccgccagccggttaaaacatcttcctgctggttttttgcagtcagagccagcagcccattcttttgcttcttctgaagcagatgaccaggaagtgtcggaagagaattttgaggagcggaagtatccgggggaagtcaccctgaccaactttaagctgaagtttctctccaaggacataaagaaggagctgctcacgtaagtccctgtttggctggcacagctcctaggggaccctctgtggcctggggaggaacaggccctggtcccaacccatgacgaccgggtctgctcaggctttccccgacctgtcctgaccacctcgagccaggcagcctgtgacaggagccagggtattcagaggtttcccaacacctttgtgttgtgctgggctttactgcaatcttctaaaagtgattaagaacaaagaaatcccctggccaagctcaccaagcaggacagagcagggcaggggcagagtggaggagagctcctcagagagctctgcaggaagccctcggggcacccagaggcctggccctctccctgaggccgcagctgggcacgttctgccctgggctccatggccaaggcctggaatgtactgccttagggctcaccaccctcaactctgtcagcctggctggcccagaggctgcgtgtctgagctggtccgcatggggttggaacagacagagttgctgatggatatgaatcagatgtcaatgaccttctggtcagccttcattgccagccacctgtcctaggggactgtgagaggctgtgcctggcacctgctccacaggtgatccagctctcacatgtgctcagagtacatttctggggtccctcttctccccaacctgaacccctcttgtaccctcacacttgtagcttgccctcctgggagtggctggatccagggaaggccttgcttcagggcctggagaagggaaggagctcctctgcctaaatattcgtgggcacatacacgtgcacacacagcacatgtgcgtcagaggcatcctaactttaagctcaactttaatttggttactttttcttcttgagttaagttgtgtgggagaaacttccagcctgagaggcaccggctgtcctccaaggactgagtggaggaggggccaccgcttggctcgcgggtgagccaggagtgggcaccagtctccctcgcagagcaggctcagcctggggggcaggtacacaccactctccggtctgacactctttttcctttgtccagctgtcccacccctggctgtgacggcagcggccacatcaccgggaactacgcctcccaccgcaggtttgtctcctgctcgggtccgtctggcctgggtgcttcgtggtgggtcttcctcctctcctcctcctctgctctccctctttggcttaccccaatatcccatctcttctctttcagcctctctggttgccctcttgctgacaagagcctcagaaacctcatggctgcccactctgctgacctcaagtatgtttgcgctccctgacctcctgtctcttgggcggcaccctcgctttgctctccttccatgaggctcctgccaaaatcagccttctccaaggtgccaagcctcagctggccccagctctcctgagatgggcagaggggcagggccgtggaggggccgattctgcttggctggggctgctctgcctgtgtgcacctgctctgagctctgctgtttgcctctccgctgggggctaggggtcgctgcaggctcctgcgctgctcttgacccatcccccaccctccagcctctcctgaagatccccgacagggctgtctgggcctgctttcttactgccctagagatttgggaaaagcccagaaccgaccagggaacgtaagccctgccgtggctcggcaggccacaggctgtgcggctcttgctaaatgaactgaacgctgataatgaagagaaagctccttcccctcccctctcctgtcacgctccagctgcttctgccttggccctgatgccctccccccatgctcatgccttctctttgctgggctcacccgtttctgcttctgtacctccctgcccctacctaacacatgggcagggcaggccctgcaggcaccagctatagcttgctggacagtcctgcacaaccaggcgcaagcacccagaggtttccaggggtcagtgtcctcctggggctggagtcagggactgttactgcctttggttttcatgcctccagttgtgctgtgactcctcagcctgtgtgaccctgagccatggggagctcctcctgggcaccggggccgagctgaggccttggaggaagggggtcccattcttgtctcctcaggtcacctctctccaggggtgtccctccctcccataggcctctgtgttgggggccctgaatccaggtcaacacaccctggcttattccattctggggccagacaggatcctgggcactggtgcctctaagatgaggaaatgaacttgctgaaggcttctagggaccttggctggctcagacctggacagaaagctctaggtctcccagagcccccaccagcagccttgtctctgttcccctctggaggctggtctggccccagcagccaggaggagtgtgtcatgaggcccttcagttcccacagagtggggtgcagcatctaagtttccttcctggaagttaatagcttcaacataagcattttctgaggctgagatcaccacagcagctgcacacattgacttattcattcattctgccgcccactttgtctagtcctagaaacccaggaaacactcagtcctgcagcttctgggactgtcctctctccctctttccttcttctcttgccatctttcttgcattcctttttccttttccaattctgctttcttttccgtgattagtctccatggtttttcccatttgggcctgaataatttaagaggagaaatgtggctgcaggcactcagtggccccaaatgtcaccatgtcctttctgtcctgtgaagtggatgcttgggcggatgaaaggagcttggcacagttcgggcctggagacatggccgtctgggagagttagtgcttttttaagactaagagcctgtgaagaaccttaacgccaaacttctttagaaataacgaccaaaagcctcccctgtgtgaaagtgaaccgctcatcagcatcagcagggtttgggcaggcagccacggcctccaggctccttcagaaactccactctcccccaggggcctttccatgggaggccacttcctttcctccctccgaccactgcatgagcttgggacgatggtggtctccccccgccacgtgtcctggtgtaccaacctccttgctctctgccacctcctgtgtgaggcggcatcgggcactggcccctcctgatcagcctcgtggcagccatgggtgacggtggccttgggacaaacgaggttcctttcatgacttccctgtccgcacctggctgcagcgacagtcagatgatgtgtgttctgtgttttaagtgaatcccaagggcgttcactcttccctcccatgtgtctgatgtggtcaagggctgtgaggacatggccgcctcgggccactcagctcatcttgtgttgggagttgagctgcaaccacacacacctgccagggcatgacaggctttgtgcagggtgaagaatgcctgtccacagcacggggatggggcttagagaggtgagacctggtgtgtattgccaaggtagagggtgcccctcagacacggtgttcccttctgcccagatggggcactcagaagcaggtggtgggaggggtggatgtggctccagattcctgcagctgaccctgggggtccacagagccatgaggggcatgcagaggggacacctgctcctctgactatgtgagtactttcctctctgggacacaactcttgagaaaagccattgaatcgggccttagtgaggactgcaggatggccccccctgtgtgttaggtactgccggccccttgggagttatacccccacctgagactcactcacagatgccatcgggaagtatctcctctgctgttgatgccactcacagtccaatgctgtgcttatccccgttgaggcctagagctgctgtgggtctgtcactctggccacctgagtggccacttgcccaccgcactgaacctgagctctacctgatgctttgctgccactgagacaaggagctggagccccaagtggccacttgaacagctgccaacccaggaaggagaggcaggccatcttcagttctcttggctggccagcaaggtatccaatgtgtggcccacagggcaaggatgaaggaatgtgaggctccccaggagggcaccccaaaaaaactcctaggggccgaagagaaggttgcaagaggtggggccagccctgctgtgccgccacagccctttgggtgccaggctgtgcccggcttcatcttcctccaagcgaggagatgtcctgtcccagtggccggatgtcacatgtgctggtggaagactccggtgaggaagggccagcagcatggaaagtgagacgtcctccctggggtctgagcaccactgcaaagtgcctttgagcagcaggtgatctggacacaagcactgaactcttgcctggctcctgcagggtcaggggtcaggaggggtgaggcacagagagcaggcctgacgggggatggatctacccgcagaatcaggtcacctcctcccactctctaacatcagcaggaactcacatattttttcctcagtggacattcggaagaaaataacatccgtgcttgtaatattaaagtggaattttgtaccaccttatgtgatacattcgtcaaatagttttgggtgtgtaaagttggacttttgtgtttctcctccttactctctgctgtaagccactggctgtgtgaactctgcagtcatgctatacaacagccaggcctggcatggccagcgccatctgctctgcagcaggtgtgcaaaaaggcctctgttcatttaccagcccatggtggccacgctttgtgagggcaagctcccagcccatccaagaagatgaactggtcttaggctgtgcttcaagttatggctcagatatgctctgaatgcctttagtccagaccggaccctacagaagtccaagctgggagcccttcgtgtccttggctgcagtggaccctgtaggcctgtcccagtgcccaggtttggtgtctgggtgtaaaccgatgctggagcagcagttggctgctctcctctcagacttcctggtctccctcggggagacgggggagcaaagcactgaacccctgagatgatcgcatcagacccctgttgctggcagtcggcagccggggtgaacatcggcgatgctcctctgcggacaagggaatgtgggtgggcgcactcaagggctgagcccagaaggctttcctctgggggtcccagggctctgggccggggctaaacgccttcacgggctcccgttccagttctgcttccctctgcaggtgccccacgcccggctgtgacggctctggccacatcacagggaactacgcttcacaccggaggtgagcctgccacaccctcaggtcctgggccccaggggtgggcagggagtctcttccttatatgaagattagaagacactaatgttgctgacagctagagtccattcccatctctttaatctgaattgttgccatttccagaacctgattaagttgtcctctgcagtaagataaaaagacaaggggtcagggctaggggctcgtggtaatgcttctccttcccgaccctgctgcctcgtgtgaaggctgtgtctgtggattctgcttcttacaactgacccatcggttgccctcactccctcccaccccaccctggggtcacagagcttgaggggagagggtgagatgaacgggtgtgagaagctgcggttccagcactaaggtggccttttttcctctttcgaaatcagcttgtccggctgccctcgtgcaaagaaaagtggagtcaaggtggcacccaccaaggacgacaaggaggaccccgagctgatgaagtacgttgggccatgctggctctttcattgcattgcggaattgagattttcgtgtgttttataatgtaaaaaaactcctactagattcccttttcattaatacaacgggtcacctaactgaccaacgccaactttcgtttctttcatttttatggaagctctcatacgctacacgttgatacctgtgaagataggagccctggatgtcgcgtggagggcatgggtgccagattttctgggcttttcaggtctggagtatttgacggggctgggagaggcagagcacccttctacctatgtcttagggccacctgggagtgggccccagggccttgcaacctgcagaatttgtctggcaggaaaggtgagatgcaggagtcaaggaggagaaggtggttagaacaatgttgaagctccaaatcccatgtgtccatccacccacacacctgtgcagagagctggtagattgagagagccaggaggatctaaactgggagccagacactgttgggtgaaggaaagaggacatcttgggccttaagtgacccaagtccttgaggagaaaagattctcctctattgctcttctcactggggcagggtgggggctcgtgtgtctttgtggggcttataggtgaaccctgactctgtgtgttatcctacttggtgggggtttgtgtccttacaagcttattctcccaatagggaacgggtcccctgcactgcccacttttaggtggggggaatgctttgctacagactcagaccaggtgacccactggccattttgcccaggaccgaggtactttcagagctgacatctggcaaaatgggcagtgggttccccagcaggtgagcagagtggaaatgatggctctggacaccttgttgcccagggttaggggccggctcggtcgggacggggccctactatgcccgcaggaagcaggttgccctcgttgtgttacctgctgggccaagagcagccagacctcacgcccggggaggggcaacttggcctgagattgggttgctcctcctggtagtttgctccagctgtgcccaaacacccggccacactggaggagcctaattgaccaacatcacatccttcagacggggatgggcccaccagctgtttggtgtaataggctgtggcttgtttatttatttaatttttacaataaaactgtaatgaatgctaaattaacaatgcaaaattttggttgttagtactatgaaggtcgcacactaaatgctgaggtggataaaaagcattttgcccctgagaatccaggaatttgcctatgatcatataagtgcaacacctttatggatttggcaaggatcctgctggcagggatattataagtgaatcgtgctgcatttgcaaatgattaaaatcaagatcagcatttttcaaattaaccaggaaaaatggttttcctttctaatgtgctgtcaactgagctttaaaaaaaaacaagagttctgcagccgagtggagactgtgactttcagaaacacttcagcatttgcaggatagaggaaggtcctagaggctccatggcagagggaacctgactactgaaccctccgttttacagggttccttcccagccataaactttaactgcacttgtaattgcctagcatatttaaacagatgcatatcaaagcagaaactggaatggatgtgtcaggtcatgctgagggatgggatttcgtcagcatgcatgagctgtgatttggggagcctggtggaacaggagtcctttttatgatatctcctgcctgcgctatttaaaattaagtcacatcaggcgcttggtggtaaatccctttgccacagctttataactggtcataaaagtcttgcggaggttccagcatgggagtcaagaggtgaatgctccccttgccctgcccactgtccctggaggggacttctggtcctggccatgtttctcatgtcactggcacacacggcttctgccccccaacacgtgataggaaacactagctcacccaagaagcacagaggcctcaccagctcagtgcctgcccccaccgccccagcacctctcaacatgatgtccctgacagcttgaaagtctccacaccaggttttgtgagaaagagaacatacctgaaatctgaaatcctctccatgtatgcgattcaagggaacaaaaacagtttcccttgatgaaggggagtagtgttttgcaagaaagggagtgaaaataactcagatttgggccgggcactgtggctcatgcctgtaatcccagcactttaggaggctgaggcgggtggatcacctgaggtcaggagttcgagaccagcccggccaacatggtgaaacctcatctctactaaaaatacaaaaatcagccgggcgtggtggcgggcgcctgtaatcccagctactcgggaggctgaggcaggagaatcgcttgaagccgggaggcggaggttgcagtgagccaagattgtgccactgcactccggcctgggcaacaagagcgagactccatctcaaaaatactactactactactaataataattcagattcgactgtgtagagtagctgaagagccagccaccccccatttggccacagagcctcttcccagccagtctgtgcctggtgcaggtgtcccccagggtcccatggctgggccatccccatcagaggggggctggacattgaatgtgaacttcccaaagctcccataggggcccctggcagtgtctctgctctggacggggatgaggtgacctcggactggctcagggaatgtcctaaaagtttctgagggccaggtgggtgggatgagtaacaaagggaaaagaaccaagagaggggcctgtggagagagagaaagcagggtcctggccgagttggctgggaagggtctgaaacggcagcttcagagacgaggccagagtgtgggggcaaggagccggacgctgccctccctgtccaggccttgttgaccttccactgggcagcgcagccctgagccgcctctcacccctacggcgggagcctctgcccccgcccccgccccctgctaccgtcctcccgagcgcttcctgcgctgacagtgacttccctgtatgcccatgaatctcctcgtaaatggagccatggtgacctctcggggtcttgtgttgccaggtaatcagcacacagggagtgtgtgacaaacggtaatttggatgagtttcatttatgaagagataagaatgagccttgcagattgaagatcttgtcctgggtttggcgtgggttcctggatgacgtggtccctcagctccccaagtcctggtccaggtccttccctgaggcagtggggacagacactcagagaggtcatgggcctgggccctctgcgctgtcctgtttgtctctgacccacactgagcccaaggcatttgccaatctgaatttatgttattttcataagggcctctatccctctcctggaacacccagaacgaaggaaaggaaaacaccatttaaggccagcctcaggcacgagtgattatgggtagcgagtctcccccacatgaggtctgcgttcttccttctagaacatagatctcagtggtggcaaagctgcaacatctatgggcattgccccctgattgcactggcctcagtctgggaggctgtggggtgacaggcctctgctgtccctgagctcccctgcttaggggaccttgtcattcttttgtgatccataggcccccaggcctatgcttgatgcaagctcccagggagtggcctctaggtggtctcagctgacaacatggctccacattgctgagtgacacacaagtgactccagcagcaaggcttggagggaacctgagagcagcccccaggcccagggtcacggctgctggagggcacggaaagaaggtggctgtggagaccccagtcatgcaggggctgtgaggccaaagcggaagagggagcgtggcccgggtcttcacactcagcccggaagggccagttcttccctgaggctccaggacctcagcggccctccctgcctcactcagaagccctttaacggctctgagttgggctccccttgtgtctggcttgagagagtctccaggcttctcctcccaacccttcgcccctgtactcaccccggcctctctgtacccaggtgcccagttccaggctgtgtggggctcggtcacatcagcgggaaatacgcctctcacaggagcgcatccggctgcccactggccgcccgcaggcagaaggaagggtccctcaatggctcgtcattctcctggaagtccctgaagaatgaaggaccgacctgccccaccccgggctgtgacggctctggccacgccaatgggagtttcctcacccaccggaggtaactgtgcctgcaggtcctgcccctctgtgcagtcagtagggaccctcgcctggggcctggggctgaagctcctgagggagggccagaccagggctccgtgtgaccagagttgctcaagggaaaggccaggccacatgggtagcggatgggggaggctagcgggtctgttggtgccaggtgatgctgtgggttatgtcttcgccatgcgtctcccctcatacgccacccttccacatcctgatggagtccttcctggctgggtgttatgctggacacagaggccacacatgagcagagccctgggtctgacacttacgttctcttaacaggctgacaacttctcaggaaaagtttgtctcctacaccttatgccctgtccctcccattcataccttctcaggaaaagtttgtctcctacaccttatgccctgtccgtcccattcatgcctcttctttgaactctgggcagagacccctgcctgccttgcaagggagctggtaacccctctctgtcaggcagtgggcctgggcagcattcaccaactctcgcctgccctccaacacctgctccagagccgaaggaccttgcttcaccagccccacttcctgtctgtgtcctatggtgacaatgagtgcctggtcccatcagaaaccctgtgtctgggcctagggccaatgctgactcttcattccctcccctgtccctcccctccccttcttccctcctccttcccctcccttctccctcctttcctcttctccctcccttcctccttccctttccctcccctctcccctttcctcccctctcccttcccctatccctccccctttccttctttcccctcccttccccttcccctcccctctccttccttcctctcccctctcccttcccttttgcctcctctcccctccccttcccctcccctccccttcccctcccctctcctacccctcccctcccttccctctgcccaccccccacctcccccactccctccccaccccctctcctccccttcttcctctcccctcccctcccccctcaccttccccttcccttcccccaccttcctccccttctcttctttttcttcccctcccctcccttttcccttccttcctccatctacaagattaattaactcactcattcaacaaaagcatttgcaccatgtaccaagccttggagagagagcagagaaaaaaaggacaactaccccttatccttgtagagtgcattttgggcagagtaggtgggacagcctgtaaacaaataaatacgtaaattacttagtatggtgaatggtggtgcgtgtgctgggcaaaaaagaagcagggaagaggacaaggaagtcctctttgagaaggaagtagcagcttggcctgaggtgtctggggcacaagccctcagcgaagtggctggagctgggaacagcctggcccgctggacaaggttggaggtgctgagggcctggagccagggagagggagcaaaagagatgaggtagaaagttctaagccagggcttatctggctgcccgctggcaaggactcagctttcactgtgagtgagggccctggcagaaggcagaggagagactagatctggcatgggcagctggcatggacacagctgcagaagccgggaaggccactaaaggagactactgcagccggggtcagttgggcagagacttatgctgggcttcctaaggacatcttaccttgcctcaatcaacctttacttatggtgtggatacaatcacttcataaatgaaatcatgcttgagaatgcacaattgtaatgcatttttctgcttgagtgtctatatccgaggagtgatctgtgactgtcattatcaccacagcctagagggtatctcagaggcagacgcagctaggatgggctcctctgggaggtcagggctgcaaagtaccggcaagtgggtcatgtggacctcagaccccagagggagccctgctgagagcaacggtgccctggccccccgagtatcaggcagggtcagctatggctgtgccagatgaggtgagctctggagtgtccccttcccagcctctgccctgcctagatgtagcttctttttccccatagaacacagtttggccatagggaggccctccaggtcatctaggtgaggtggaacatgccttctgttaacccgtaatgtgtgaccctgggctggccgtggtgggtgaccctgggctggccgtggtgggtgaccctgggctggccgtggtgggtgaccctgggctggctgtggtatgtgaccctgggctggccgtggtgggtgaccctgagctggctgagtgaccctgggctggccgtggtatgtgacccggggctggccgtggtatgtgaccctgggatggtcatggtgtgtgacccggggctggccatggtgggtgaccccgagctggctgtggtgggtgaccctgggctggccgtggtgggtgaccctgggatggccgtggtgggtgacactgggctggtggtggtgggtgacccttggctggccatggtgggtgaccctgggatggctgtggtgggtgaccctgggatggctgtggtgggtgacactgggctggctgtggtgggtgaccctgggatggtcatggtgggtgaccctgggctggccatggtggttgatgctgggatggtcatggtgggtgaccctgggatggccgtggtgggtgaccctgggatggtcatgatgggtgaccctgggctggctgagtgaccctgggctggccgtggtatgtgacccggggctggccgtggtatgtgaccccgggatggtcatggtgtgtgacccggggctggccgtggtatgtgaccccgggatggtcatggtgtgtgacccggggctggccatggtgggtgaccccgagctggctgtggtgggtgaccctgggctggccgtggtgggtgaccctgggatggccgttgtgggtgacactgggctggtggtggtgggtgacccttggctggccatggtgggtgatgctgggatggtcatggtgggtgaccctgggatggccgcggtgggtgaccctggaatggtcatgatgggtgaccctgggctggctgagtgaccctgggctggccatggtatgtgacccggggctggccgtggtatgtgaccccgggatggtcatggtgtgtgacccggggctggccatggtgggtgaccccgagctggctgtggtgggtgaccctgggctggccgtggtgggtgaccctgggatggccgtggtgggtgacactgggctggtggtggtgggtgacccttggctggccgtggtgggtgacccttggctggctgtggtgggtgacccttggatggctgtggtgggtgaccctgggatggctgtggtgggtgacactgggctggctgtggtgggtgacactgggctggctgtggtgggtgaccctgggctggccgtggtgggtgacgctgggatggtcatggtgggtgaccctgggatggccgcggtgggtgaccctgggctggccgcggtgggtgaccctgggctggacgtggtgggtgaccctgggatggccgcggtgggtgaccctgggctggccgcggtgggtgaccctgggctggccgcggtgggtgaccctgggatggtcgcggtgggtgaccctgggctggccgtggtgggtgaccctgggatggccgtggtgggtgaccctgggctggctgtggtgggtgaccctgggatggtcgcggtgggtgaccctgggctggccgtggtgggtgaccctgggatggccgtggtgggtgaccctgggctggctgtggtgggtgaccctgggatggctgtggtgggtgaccctgggatggcggtggtgggtgacccggggctggccgcggtgggtgaccctgggatggccgcggtgggtgaccctgggctggccgcggtgggtgaccctgggatggccgcggtgggtgaccctgggatggccgtggtgggtgaccctgggctggccgtggtgggtgaccctgggatggtcgtggtgggtgacccggggctggccgtggtatgtgaccctgggctggccgtggtatgtgaccctgggatggtcgtggtgggtgaccctgggctggtgaatgatatgtggcctctgcttccagtttgtcaggctgtcccagagcaacctttgctggaaagaagggaaaactgtcaggggatgaggtcctcagtccaaagttcaagactagcgacggtaaggatggcttcctggatttccctgctcatggctgggtgccagggtaagtgagagctgtgcaccttttgtgctggtgggaagaaggttagggagatgaagcccctcctggaatgagtcacggcagaggcagatcccttcacctaagctgacagcctttcggaccttggctctgaagctcttgacacctgtgtctggggtccctggccctgaggaggtcatgcctgctgtaacctgcggctttggtgaccactgggatcagagtccagtggagcccatgtgctgtgagtttgtggagaggtgtggctcattcccccttaggtgaggaaattcagcattgcctgaacaaacttccatctttaatgtagcatttaatacctcccaaagagatttaagcctttccacctgccagccagctcggaaggcaaactataaacactcatctcacaattttcaagacagatttctccagcgcataatgtggggtatgagccccagagagagatgagctcggaaaaccaggaggggagacctctgctgcacagggggtttcagttctagaaagcaggcttccccacagcactttggcccaggcctgcctgaggcccaaagccacaactgaggtttctctctgggtcagtgttggagaatgatgaggagatcaagcagctgaaccaggagatccgagacctgaacgagtccaactcggagatggaggctgccatggtgcagctgcagtcccaggtaggtggtgccgccccccgctcctgggctctttgcccacccaacccaaacattcgtcttggggacagtgaggcatccgtcggcactcatcaaggttgctgtcagggctgagctgacggacagcgcagtggctggcacacaggcacacttaggacgtgctggccgctcacaatgcggagtccgtgaagtcacactgtgagtgccagtgggccgccggagctggttgtcccgccagggctgtggtctcattagtgttaataacactattaataatactagtcccattaagattagcagcactgtttctcttactctcattagaatgagtagtcctgtcaagaccagcggtcccattaggattaccagtcttgtgagtaccagtggtccatgagcgtggtgcggtagagccaggtctctggagccgggtttccttcccagcacccagcacagccacatgtttgtcacagctgagggacctgacaaacctttcagcctcttcctcagtcaattcctccataaaatggaggtaagaataggattctactccagccagttattgtacaatgaacgcatttctatgaggaaaacattcagcataagcacctgatccagagtaagtgccgtcgatgagagctgctgttgctgagggttaggattacaaattattttaaatgtttgtgtcatatttcctgatttccctaaaatgagcatttgtaatcagaaaaaaaaaagcagtaaagatcttattttgaaaataagagcatgccccacctgtggctgctgagtggagtctgcagccgtgctgggggagacataactgtgcccctaacagctagagggacaaagggacaaggaagtgaccaggtcccacagagaatttgggcagagcccctctgggcagggacagatggggagatggtggcctccaccaaggcagcaaaaaatgagtaacatcctccagccccacgtgtctcattactctgctcttgtctctactggcaaacaggctcatgttgactctgctctggtctctactggcaaacaggctcatgttgactctgctctggtctctactggcaaacaggctcacgttgaccgcttgttactcaagagcctgtataaaaatagcatcaccccacagggatcaggaaggattttcgctgtcatgcacatgtcgatgttgcatccccccaggttcataggcagtgacgacagagaaggagtgatggccctcccggcggagccatccccgtcccctcctggtgtctctgagtgtggagatgcactgttgtgtgggtgtccattttgtgctccctgctcctccccttctcagagtccccagggccttcatcagtgtcagtgtcgttggggtagcacctctgatttctttttatttgccaaaaccaatctttttaaagacagattattaccttttactagcatccctttggaaggactcagaaacccctgtccatctgagggagtttggtgactggtgccctctgcggaagggcaaaggcaaagggaaggcaggtccctatcccccatgcaaccctttcaaagccacatgcttgtcaccaggtggcagaagaagcgtgcttgaccccatccacagcctcccaggaatgagctccccactcctgcctcgtgtgtcacccacactgtctttctgtgagtttagcctctgcccccgtggctccctgcagatgtgcagtcaggctgggggctattcctggacaccaaaggcctcagggccaacacaaccctgggcaggttcaccgccatggtggggaagtgagaagacttgcctgtagttggcctggggaagtcgtgcttgggaggccctgaggaggctctttgtggggatttctggtgaggggaagacccaaaggcagtctgacactccacgggggggtgcagtgatttccatcttacagatagaagcaggaaacatggtgaagctaagaccacagcaggtggagtctgagattgagacagggcgctgtgaagtctgtgctcccaccccatcccctcaggacagaggggctcagaaaaccaggagtggggacttctcctgcacggcgggtttcagttccatctagaaagcatggcacagagggacgtgccacacgagcccccttcctggcttccctggagtcagcccatgtctccagagggcccttgcctttctctcctctgccagcccctcacctgtggcagaaccccctacaggaaggcagggtccctgcctcttcccccaccccagggttctgcattctcccagagggttgtgagaggcagcccagagaggacccccaggaggatgggggccaagggcaggcggcacttcgaatctctctctggcacagatctcctccatggagaagaacctgaagaacatcgaggaggagaacaagctcattgaggagcagaatgaagccctgtttctggagctgtccggcctgagccaggccctcatccaaagtctcgccaatatccgccttccgcacatggtaggcagcacgcgggcctgccggcaccacagctaccccccagggtctcttcggaaagcaggagggcagggcatctcccaccccctctgcctctgggtcctgccctaggggccctgtgcccttgtggagattctctccaccccgaatggcccgggctgttggctgtggtgggtttagccaccataatgagtagctgccataaagagtagctaatgaatccaaagcaaaatggtgattccatgagcagagaggctactgctgggatggctgcagagaggaacgcccagtgctgcctctggttggtgtgggcttgtctcaggtcacgtggggacataggtttgatgctcccacatcaggctctgcggtgtggggcccactgcatggacggagcttgctaacctggttctgttctctaggagccaatatgcgaacagaatttcgatgcctatgtgagcaccctcaccgacatgtactccaaccaggacccggagaacaaggacctcctggagagcatcaagcaggctgtgaggggcatccaggtctaggccgtgtggtacccagaagtgtcccagcccaccacaccgtttacctccctcgccctgccccgcaccgtggggatgcccaactcacagtgacttcccgtttggggcccggtgtggccgcgggcgggtttatccaaagggatggctggaaattggccgctcccacgaggctccctccaggcttggggccgtggtggccctatctgtgtgcataggggcactgaagaattacaaagtgatttatttttgttttctgaaagaaatctgaagagcagctcaaagtctccagtggaagctcatggacaaggttctcagggaagttttggagtttgcaaccacagtattcctttgtctgtcgaggctgggagggtagccgtgagcgtggtgggtgggtggtgtgagtggcatcttggcctggaggacacgcctggggcagcgtgtctgtgctcagtgagggccgatgaagaaagtgcgttttctgttttcatttaattcagttttgtgttaagggtggaacaaagctctgttctagagggaaagttaggaataggcctcccagaggatactccagacagttgacaagcatcgcagcccctgtcaggtcaaggaattttaacctgggagactcctgaaaatcagcctaatgtctgggggcagctggcgctgaggctgtgcagatgtgtatggccttgggtcacagctccctactggggctgcagcctttagaccctgggtctgggatccacgtctagggaccactctggcttctgtgcatccacccaggcccccgacccatcactgccacattctccgggtcatggccgagcttgacctctgcatccatggtgacggaggtggcaatgacatcatcaaggtcagagggtaaattcctaacaggagaccacaaaggtttcacttcttttagatccatccaatatgcgaaaaaagggtacattttaatttaatgtgttaaaaacacaatgtccctaccgtgtaaatagaatccaagtcaattgtgactgcaattccaagttagtatttaaaaatagagaaattgcacttcctggaaaaaattaaaaagtagttagtttaattattctgtaaattatttaattttgtcaagatgtaagtatttatattcacagcctcttatgttaacgtttgctatttatttaacatttttatttattaattttatactatttcaactagaccccacaccagggcaccctaagaggggaaaaaagtgaattcaaagcaaaaataactatttgactataatataggccacaaaaaatcttgatataactcctagttataattttgatgcaaccaagttattttttatatattttgttatttattcttttaataatggaatttttttaaaaagtattttgtaactgaggaattttgataatttggggattttgttttcccttggtctaatggagagaaagacattttggttttctttttccattttgggttccttttgtttcaggcacggataacagcaaatggaattctgtatttattattatttaagtgtagcgcagatgtgtgtgcttgggcgtgtttctcgtgtcgcgtttgcgtgtcggctcttgcggtggagtcctgttgctgtgagggagtgctggccgcaggcagcctcgagtcaccgccaggctcacaggctgtgccacccgtccctccgacagctccaatactgtgaccctccttcctcaggaagcgcgttgaacccacagcactccgtggtgtgtttgcagggtgatttcctaataaaagtccactctgactgtgaatcggtgctgtggtctgtggggaggacattgtctccattcttggtgagctctatcatgcaccctcctgggagcacatgcccaggaggggaatcttccatctctggtctccccttgataccacacgtgggtcccctctggtgtcagcttagccagtatctccttttgaaactaccctacctcaccgcctccacgtgtgtttctagaaggtgtaaatcattgtatcttgccccttcccacatgaccagtcatatgcaaattgaagtttttcccaggagtcttctcttagggtcagggagaataacttttcctgctgaggttgttagacttgggggtgtggaactggggttgccctgggctatctctcctggccacaggatgaagccatcagtagtaggagagagttcagacattctggaggggggcaaagctgacaatggaggtagatgtgaaggaaaagggagctctctgatgatctttttagagctcatggacccagccatgtctgaaggcactccacccttgaactgcccagttatataaggcaatggtttatttttttttttaagctggtatacaaggccaaaaagccaatgcataccagctttaaaaaaaaaaagagacttctcccctttttcattttcgtacttttgtgtcaggtggagctctagtgctcctagagtaagacctggacttgggacttctagtcacattcagcctaaactgtcaacatgcttttgacctccctggaatctggccctggtggtagtcctggagcgtccatctgatatgcaaacaaaggatccatcttcactgacaaattcttagaaattctggactgagtttccaccctctgctgtagtcagacagggtccacaacacctgtggaggacatttgatctgccttcaaggctccaactgctggttgtgggggcccaagcaggtgccagtgcccactggtgggttatgcagaacatgttcaactgtgaggaagggttcctgggggtcccctttggtgaggccccatttgtgatggggagaccagtggcctggagttgtaccccttcacgtcagcacagcagatgctggggtgggtgtgagcaagaccgattctgaagtgtcccctcagcaagctgaggtaaagtcattctggggggtatgagagttggctggagaggtggggactatgatgttcctgctaggggacacaggctgttaccatgatgttagaaagctgcacaatcccatagtttgataatggcacgagctggtcacccccaagaagattctctcacttttcgcttagaggcactggctgggccaccagcctactgggagctgagagaaagagcgtctaaagtcacaggcatgtgctctcttaggatttatttttggtatgggaccccacagctaggccttctctaccagcctgcagaccctcctgtttactgtatccagaggataaagctcaaggtttcatccagagggaggggagtgtttgccaggctctcagagtcggggtggagttctggggaagggggctactggctcccgaaacactttctaccagttgtcttctcccatctccaacagaatctggtgctaccagttattgggggttctgaggtatggacggtgttggctctgaactttctacactctggctagaattcagtgttttgtgtctcctaggccatttattttgcatctgtgaattttctggcttctaaattgcattgttgtcccctctttcatctcctcactcctgccaatgtatgccttaaaatctgtcattttaggcaggtgtaagagagaacaaaggtaaatacacatgtgcacctgctttccttacctgaatgggtatgcttccagttgatgagcacacgactgtctccctgaacagacgggaagtcagcttagtgctgggtcgacatcaccccatgagtaagggaagcctcaagttcaggtgagatttttcctattaaccactctgtctccctgaagccagtagcctctcagaggctgctaaagacatggatgtggagggtttcctaactgtcagctgattgtgaatcctgcaacacaggccatccatgctcccaggggttatagcatctgtgccattccctctgtccttcttaaaatatggaggtggagtgtggacttctctaatggagtcttaagtcttcacaagggcacccttatccatgatcgtgggtggcctgggctggtgccaggcagctgacctttggcagagctatgctctgagccactctggccctcactgcaccccaaccctaccatccctcctggctgctcccattgtctctgcctctctttctttcctctcagtgtctgcagcatgcaggtctccgtgtgtgctgacttttctaaagcctggcctctcctcttccagcacctgctatggctgcctcctcctctccctctactgtatcttcctcccacctgcttatgtgctcctggcctctcctccttcctgatttccaccctaccctgcagctgcctcagggctgtcccagcctatgtcccagcccctttcttctcattcccaaggctgatgtctgctgtgtgcagagaactcccatactgtcccccaatcctttcttccctggctctagtaccttctgggtatgcacttggatgccccagaggcatcaggacacatgcctgggtgaccacaacagcctgctcgctacgcccacctggtcctctctgggcccagcaagataccaacccccatcagcccctggtcttcactcacccagctgaaggtcacatggccatacgggagttgccaacaggggccacaactgcctgatgtgccacatgaatgtgaatgcccctgtggagcacccagcttgtgctatgtgccaccccatggggccaaccatagagcagccctgactagggcaggtgtatgatgtgggggaagaatggatggttattttggatcctggggaaagccacgcagggatacgtgcacaacagcacagtctgtgccctgcccagcatgtggacacagtgactcccctgagctcctagagagcccctcccagtaactggcatcacagtttcctgagctgtctacttgggctgattgtagctcctgagaactggccacacccctggcagcctcgtgagccagtgtaggtcttgaggggcacattgggagccccacgaggttggaggaagtggtacagtctcagccctgcagagccatccctgagcacccaccactcccacggtgagaaaccttgctgggggggcagggggtgcctgtgaagccttgtcccctgacccacaggagcccaggggcaggagggtgagcagcaaactgcagccaccactccagcacccagcgaaccctcttcatgggacccattcatctctgctcatggggcaccttttgccaaattagacacacttttgcctatttatttcatacactgtcaaaagtgttttccttgtctttaattcggtcacagctctctctgtagaagttgtcaaaatagcagaagtcaaatctggtaatatttatgactaaagatggcgaggagccatgtgagaaccaacctgctgcctaggaaagaccaacgagaagtgctgcgggttccaccccatatcccctgggccactgcttgggacccctgatgggtggataatctcagaacccatcaggcaccaaatctagaagggttccattatggctgccctaactcccaccccacatagaagtcctacttggctcagctctgagcagataaggagaaataaagactgaccattattgaatcttatccctttctacacatttgggctccttccacctctcaaccacctgtgatacaagcaataggattgtccccatcatgcagatgaagaaaccaaggcccagggaggcccagaaggccactcagagtcacacagggcttggctgtgcagccggggtttgccgcaggcccctgactccagagctggcgccttcggaaccacatgatggtgtctgcagcatattcaggaggagaagagcggatctgcacagagcagtaggatccagtgggtatccaaggggccagaggagaaggggctgctgtggtccctagtccagtgggaagggcaggaggcaccaggaagaatctgcctggcagggcagggaaagatgggagctcattgctgggttgctccagcctcaggagagttgggaaccatctgggtccccagtcaggatgcctaaagaagaggccaggggaggccaggtagatgtcattgcctctggggacaatctgataattccccagagcaggtgggactggctggagaccacgaaggctcctcgaaatggaggcagattctccagcctcatctgcctccatatttggtgaagagagctacacagaaagcatggggagaaaatggggcacaatggtggtcacgggtgcccccctgagggagtttgcacttgacctgagggaggcgcgggccagccctgggggtgtctgaggcaggggcagggaccctggtgggagggaggaagggtgccagccagtgaggctggccaaggggcaggggcagcgggaggcatgagggataagggagttcagccacggccagactttgacgctgtgtgagatgcaaacactgcgggtctggggcagtggagtgatcttgctgatgtgttttctggtttatttgtctgcacaagatccctgagatgagggtcttgtcatactaaccctggatgcccagggtcaagagagcaatctgcccttgaggcaaacagtgctgagtggagggagggaggggaagtccagggccggcctcaagtcactggggacatctggatgagtgctgagacagggcagggggctccacattgcatttcctcacccagatcccaggactgggctgcccgggagaagctgacttggagctcgctctccagacagctggcaattgggtacctctccctgtgcctggcacccctgcctgccacataaagccatcctgcaaaggtgcactgtggtcccagctcacccacctatgacacttcagggacatccctgcatctcccatctataccagccgctcctcttggcttcgagatctgcccctggtgggttgctggctaccggatgtctgacaacagctgccagcctggttcggaagtgctacccaaggccctcctgtttgcacctccaggtccagctgccactcacctggtgcccagggagtggaaacatcctctgctaccacctcgtcctcacgactagtctggtccaccacctgttgcagtaagacgtttctggggcggcccctccttcttcaaggccgatacccactcacatgttcccctccgggttttcctttcacaattcacaagaggcagtgaggagtgaggagtggtggaagagctggcacaggggacaatgtcaccaggaaccctgggtcccacatcctaagaagtgtgggtgtcagctcaaggcactcccacctcaggtgtgctgtggacagggctctgggccctgggtctgacaccacttctttgtgaggaccctgtattagccagggtccccagagaaacagaaccaataggggatacatatgtatctcttacataggcccagcaaagttgatataaaattggctgctgcagacctcttccctatgcccacgtaaagtggtttgttttaagatgagaaataatttttaagacagttgggaatgcccaaccgttttatgtacgtgaatacattcgagttcaccggtattttcagatcagcatcaagctgctgtcacctgtgtggcatgaatagcacagaagctttgacggatgtcggaaaacagactggcttgttccactctggctacggggcttaagatgaggaagaaggacttccccttccagatgaccccgtttgtctcctcccaagacagcagctgttcagcggtgacaccttgcggtaaattcctcatatgagccccccccccgccccccgcccaccccagccacccagaggtgcgagagaccaggcgtaaaggtaaattcctcatgtgagcaccccccgcccacccggaggcgagagagaccaggcgtaaggccattccttagcagtgccggtcccctgcccctgaggccctgacagagccggcctgcatttcataagaccgagggcaagtatctcagaggcccaggacacctagagcgggcatgagaccttgccccttcactggactgcaaaaagcacccaggagacgttggaagagtggcagggaaggggctgaggacgtagggcggctgctgcaggggcctatccacacatccacccacttcccttgtgaaagctttctgctcagcatggggggagaacccctggcacagcgtccatccgagcgtcttgttctgattcgccttcatccagccactcctgtctcagccacccctgaccaccaccaagtactgagcagggaaatggcgaggcagccactgtctggtactcaggagcggagctcctcctcaggaacagggtgctgtccgggcacagtggctcacgcctgtaatcccagcactttgggaggccaaggccggtggatcacctgaggtcaggagtttgagaccagcctagtcaacatggtgaaaccctgtctctactgaaaatacaaaaaaaattagccaggcatggtggcgggcacctgtaatcccagctgctcgggaggctggggcaggagaatcgcttgaacccgggaggcagaggttgcagagatcgcactactgcactccagcctgggtcacagagtgagactccattaaaacaaacaaacaaacaaagaatggggcacttgttgtaaaacccttagaggataaaaaaaaaatttttaattgtcattgcaaaagcgacattgtccatcatacaaacaaacatcacagaagtaaattaaatgagaagttgtgtccttagccagagctgagacatgctaagaaattaaccttacatatttacccatggagtctcatttccagagtccctttttaaatgtagagctactcttccatctgcttcatttgctatctgcctgaaaaattccctttaacatttcacattgtgttggtctgctaatgaattcttttagctttgtatgtctgagaaaaatctttcattgtttaaaataaatgacaaagtttatttttgagagcagtttgggtttacacaaaatttgagcagatagtaccaagagttcccatagacccctctccttattattaacatctggaatcactgtggtatgttataacaactaatacaccaatattgatgcattactattaactaaagtctagtctacagttcacattagggttcactctttgtgttgcagttacatgttttgttgttgttttgtgggtttttttttgttttttttttggagacaggctcaggctctgttggagtgcagtggcacaatcactgctcactgcagatttcacctcccagcctcaagcgatccttcctacctcagcctccagagtagctgggattacaggcatgtgccactatgcccggctaatttttttttttttttgtagtgacgaggtctcgctatgttgccaaggctggtcttgaactcctcctgcctcagcctcccaaagtgctaggattacaggcatgagccacagcacctggctagttatatgggttttgactaaagcataataacatgtatccaccattacagtatcatacagaatagtttcagtgccctaaaaaccctctctgctctgccagttcatctctccctctccctccaaccccaatccctggcaaccattgatcttttcacagtttctacagttttcagttttcccgaatgtcatatcactggaatcatatagtgttaatatgtagcctttttatcctggtttctttcatttcgcaataagcatttaagtttcctccttgtcttttcatgtctcagagctcattcttgttatcattcattcatactccattgcttagcatgtatgagtttgtttattcattcacctgttgaaggacatcttggttgtttccaaattttggaaactgtgaatacagctgttataaaaatctatgtgcaactttttgcatggacatagtggttgagtaagcacctaggagtgcaaatgctggatcataaggtaagacttgtgtcttccacagagcagaagttttaattttaacaaaatctaccttaccaatttttactttcacggattgtgtgtttgacttgtcaaaagagtcatcactaaacccaagaccaccaggattttctcctatattattttgtagaacttttatgtaaaaagtttgagatctatgtgtagttttttggttttttgtttgcatatggatgttcagttgtcccagcatcatttgttgaaaagactattctttctccatttaattgcttttgctcctttgtcaaagaacagttgactgtatttgtgtaggtgtatttctgggtttactattctattccattgatctgtttgtctcttcttttgccaacaccacactgtcttgattactgtaacgttataggtcttgaaatctggttgtgtcagttctccaacttcgttcttcttcagtactgtgttggccattctgggcattttgcctttccatatgcactttagaatcagtttgttgatatccatgaaataacttgctgagattttgattggtgttgcattgaatctacagattaagttggaaataactgatagcactgctgagctttcctctccataaacatggaatatctgtctatgtaaatatttgatgtcttttatgagagtttggtagttttcctcatatagaccttgtacctattttgttaggtttatgcctaagcatcccattttttggtgctattgtaaacagtattgtatttttaatttcaaattccaattgttaattgctggtatataggaaagcaactggcttttgtttataaccttacatagtagtcccccatctgtggttttgctttccatggtttcagttacctgcagtcaaccacaattcaaaaacattaattggaaaattacagaaataattcataaattgtaaatcatgtgctattctgagtagtgtgatgaaatctcgtgccgtcctgctccatgctacccagtacgtgtgccacctttctgttcagcatatccatgccatatacactacctgcccattaatcacttagtagctaacagagagaccacactcatgtaacttttattacaatatattgttatagttgttcgattttattattagttattgttgttaatctcttgctatgcctaatttataaattaaactttatcatagatgatccatatgtaggaaaaaacatagtatatatagggtttgattccatccctggtttcaagcattcctatatgtactatagagtttggtacatatccccaacagtgtcttagaacatatcccctaaggataaggggggggactgctgtatccagcaaccttgctgtagtcagttattagtttctggagttttattggagattcttcagggtataatacacagttaatcttaccacctgtgcaaaaagacagttttatttcttccttctaaatctgtaacccttattttcaagtcttattgcatcagctaggacttctatatgatgttgaacagaagtagtgagaggggacattcctgccttgttcctgatcttaaggagaaagggtccactttctcaccattaagtatgatattagctgttggttttctgtagatgttctttatcaagttgaggaaatgcccctctctctattactagctgggtgagaatttttttttttttttttttgagatggagtctcactctgtcgcccaggctggagtgcagtggtgcgatctcggctcactgcaaccgccgactccctggtttaaactattctcctgcctcagcctcccaagtagctgggattacaggcatgtgccaccatgaccggctaatgtttgtatttttagtggagacggggtttcgccatgttggtcaggatggtctcaatctcctgacctcgtgatccgcccgcctcggcctcccaaagtgctgggatgacaggtgtgagccactgtgctcagccagctgggtgagaatttttaacacgaatgggtatggagttgcagttaggcatgatgaaaaaaatgtggagctggatagtagtgaggttgcacaatagtgtaaatgtacttcatgtacacttaaaaatggttcaaatgataaatgttttgtatactttaccatagtaagaatagtgtatttcgaagacaacaacacaacctcccacatgtggctctagctacttgctccccagatacccagccgcacccctgcctcaggcccttgcatgaccttccctccgtccgaggctcctcctgcagatacaacacagatgagtggagagatgcaaggggataggcgaggggacactgaagacatactcagaaagctccccgtggctgggtgtgggagaagcctggaggagggtgacagcagcagttggattcccatccaccttcctgtgcttactactagctggtaagtacaagaagccagcgaacctcttgcagtttcagttccctcatctgtaaaatggaggtatcagtgtcgtcaagccaaaggctgccaggaacctgcctgtaattgaatgagttgggattatcactcattgcagcgagagggatgcagatcatggagaactgcaaggcatctcagtaagaggtgtcgggaaaagttactaaaggttatgggcttgagttgggtgatttttttcatggattagatgctgtcaggaattgggggagtggatggggggaaagggtggttctctgggcatctcagtagatgttatctgtgaggaggccagggcagagggaggctcagctgtagctggtagaggagcgggggtcattgttactaacttggagatgatatgtcttagattttgtgggtggcacagttaccctgtttttgtttgtgcttagacaaaattatgacgtggccttggatcatgatggtgctcctctacaaaattatttatgtccaacaggagaccccatggcctcgatctgagtgccaggccagctcctgatgtcacggtccacttttcttcttggaggtcatactagtacctatttcatggaaataacccatgtagagtgctcagtatataccctgtgaagggttatgaatgctgatggtagtggaagctgatgtggaggggaatggtggagacaccttggaaaaccaagcaagagtctgaagttgtggcaggccgggtctcactaacgcaggcctccattacagctgtcccagcacggactgagtagccaggttaaacattaaaagctgattgagccaatgcccttatacaaaggttggaatgtaacaaagagcccaccaagagttttgcctaggctcttcctgggccttgaagcatgacaagataacgaaggaactcttaacaggaccctttttaggattaaacaagttgtattagggatctgaagaaactccccaggcctccacaaacaagtttatgggggtctaaaggaattccccatatcattatgatttagcaggagacaagataagggtaatcaccccagcacctagacccatttagattaagtaaacttactgaggctccagaagagggtcttcaggactcaaccttagtcatagattaaaagaagttaatcacttatgtctgtagatgaatgcacacttacatgtagacatacagcttagaaggtatacgagctttggaaaactttgtaattttgagttggtatggtgataatttccaggccttctccttgtaaccggttacagaaataaaacctctcttactctccagctcatttgcatcttgttattgggccaggagaagtagtagcccgaccctcagttgggtccaggaacaaagggagtgtctgaagacagcagtgatgtgatcacctgttttaggaggaccactcgccagagcccaggggaatggtgggaggggtggggagaggtgaggggagctgggacagggcaaggagggatgtatggaggacgtgtcccctggcagtaggaagagagtcaaggatgactccagggcttctgtaatttgaaacagtcacaaataaccacaagctctcaggtggaaggacactgagagccccatgaaggtcatgaggtggtgggccacctcaggtccgtggatccaggaccatggatcaacaagagaagtgaggtctccctgggaccacataacgtggtgaaggcaccggcctttggttttcaaactctgctcctaagtggagctccagggtctggggaggaatgccgagttaggagggaggcgggaaccggagacccaggcccactcgtccgccccagcgacgctggcacttgcacatatgaggcggcttgcatggctgtgcttgaagaaagggttctgcagctacagcctatctgcaaagccccacgcgaagtttgggcaatgggctgtgtgaacccagaaaatgggagacaggtctcagttaatttacaaagtttattttgccaagggtgaggacgcgcccgtgacacagcctcaggaagtcctgacatgtgcccaaggtggtcggggcacagcttggttttatacatttagggagacaggatacatccatcgatacatgtaagaagcacatcggttcggtctggaaagacgggacaacttgaagcaaaggcaggaagactccaagcggggagggagcgtccaggccacagataggtgagacaccaacggttaaattcttttgagtttctcatttgccttttcaaaggaggcaaatcagatatgtatctatctaagtgagcagaggagtgactttgaatggaatgggaagcaggcctgccctaagcagtttcctgctggagttttccttagtgatcttgggggcccaggatatcttcctttcacagctgatttcacaaagccggctgggtaggagggccccagggccgggtggccgtccgcgtggcagggcgggggtcccagggcggctgtgcttggtgctgggaggccgcccgagggcagcgccggccccgagtcagcagccgcagggcaccctggagatgcggaacgcccccagccgtgggtcagcaaaggcgtctcaggtgacccttagggagggcttctgaggcagcccgtgcggggtccgtcctggctgagcactgcgcggacggcgcgcccgcgagactcggacccggcctagggctcagcgagctctcagcggggcgggcggacgcaggcagcccaggggagtggggcccgccctgcgccgccatcacccctttaagtgccaggcccgcggcgcatgcgcagtcaggccgttgtgcgcaggcgcagaggcggcggcggcggcggcggcggcggatgtttacggcggccgaggttggagcggcgctgctcggccgcggacacacgagggacgcgcccgaggagctgcaggtggcagcccaggcggtccgaacccgtcggccggccgagcctggaggtagagccgccgccgccgccgccgcccctcggtccggcctgcggcgagcgggtggtgtgtcccctcggccccttccctcctccttccccacccccggcacccctgcgcccggagctctcctctgggggcgtcgctcctccccacctcgggcaccctcacctccccccagcggcctccagggcgtcccgcgtttctctctccgagcgctcgcggtttcccgtcggtctctcccggtgcccgttgctcactcacactcttgggtctggttagtccagacctgcagcttgtctttgacttcccaagtgggaaacgtttgcagttccaaggcaagccaagagctaaggtttagaacaaagtctgccttggaccctttcagaagatgacaggattttttaaaaaaataattgcgcccccccgccccgtgccttggagatagtaagaattggagcagagcactgggacttcaattcacgcatggaaagagatctttgttagttggaggaaggagaacttgcctgagcttcgggcctttgttttgtttttgtgagagggacgtgtctcctaaatgaatgtttgctccagcgttgcacctcaaataagtcacctaaatatccacgccctctttatccaccccctctttactcgtgtgactagaatagttttcatttttcttctcaagggaatggctaaacagctcctatctgggcgtttgatagactgtcattcaagaatgagtgaagttgaggtgcctataagcaactcagaaattgttgtggccacgcttgggggaaatagagccctacactcaggtgatgagaggagacctcagaggtgaccgatccagggccttgctccctgcgccaccccagctcgtacctccagtggaacttggctgggcttatcaagagctcctttcattcattgcaacttcatttgttagaaagcttctctgtgtatttagtaggcattgtctccaacatgtaccactggtctggcttttgttaggcccattaatagtgtacatgtgacagcctttcaagtataggtgctccccggcttacggtggggtcgcatcccagtaaacacatcgttaaacctgaagtcgaaccatccgaagtcggagaccatctgtatttgaaaaaagtccctttgcattgcttgtaagagttctggttttcaaggtgagaaatctgtttgtgtgtttgtttgatcattctgcccaaaggagatgtggctttgggtccttttccccactcatcttccacaatgaattactttgtccatattaccctaaagaagtgacatccaagttggaatgtgatcttccgtatgtcgcctcccaaaaccccactaccatagcttcatgcttgtgttgacacagccacaatcacaactcaggtgtcagttctgagaccttcccatgcctgtcgccactcagcaagtgttcttcatgtgccctggcagttcgcattgtaaggagcagccaggttgttatggactgttgctagttaccacagagtagtgaattatattaaggattaattacagcagacaatgtgcacagtatcatcgagtgcagcgttctaaaaatgattctacacttttactttgaaaaattggatttgaccagattgtagaatctgggtgaaaatgataggatttggtttggcgaagagctttgttgtcggtgtttttggtgacatcatgactgatcatatcgatggttttcagtgcgagggagtgttagattaccagacaaagatggtaataaatatcagaccccacagctattcacatggatcctaccagtggcaataggtatagatagggttaccccatcgtcaaaaggttaccggtgtgttgtgtggtaaagaacgttgctgtcttgagtatttttaaaagctgcactggtgtggtattaaaaacacaggccttttgccatacagtcctgggtttgaatgcagccccctcctcacaaactggctatgtgatcatgaacaaattaaccggccagctccaatttgcttcttaatgttgtgaagtgtaaatgaggccatgactggcaggtggtacctggaaaaaggtgcttgtttttactaaaaagctgtctgaactttcaaattaaggcagagttcaaaataagtgatagttacttagtggaaaatgaaacctatccaacatacagtttgaggttaccttctagagatgtggcattgagacaatgttggaacattatatacaggcttctgggtgaagaggtggctttgactgaggacggtatgcgattttccagctcttttcctaaatagacccttaagcatccaaacacatgattccgcttttaaccactgacccaaattttaagatgactgtggtaggctagggtgcagcctcagaactgagtggcttatccaggattaaagttgacctcattaggacttaattccatctaagtctaagtcagctggctgtggaccgtaatctaacaagggctccgaaacaattcaaaaaattcaaaaagggtgtgaaaatttaatgactggaccatcctattgatttgcaaaacctaatattcagctctaaaatcttgagtgtgaagattgagtgttccaccataaaaatagaagagaatttgtgttaagctatacccttcacactttttgttcacttgtaagaaactatgtgattattttcattcctgggaaaacctcccaccgctgtctccagttgtgtacgtgggtgtgtatgaaatccgccccaggccccttgtcaccccacagtatttctttacgatcctcattctactgttagaaatccagaggaatgtgaggaggaaagcaagtataaacttcatcataattataacaagttgttaaaaaggttgtgttcatttcagaaaatgtcttcatgaggtctggtggtctttttccctgacaatttgtatctggtgttttgtaaagcattaccattttatatgaagttaaagcagttactttgaaaaagttacatggggtaagtataaaattggaaaggatatttttgtagttttaagaagagtaagacttctccgcgtgaaaaagtgttttcttgtgaattagctgaagctaccctgtattttaatagttaggctcagaggtgacacatgctgtgctttttcttcttgaaggcaggttgggagaaggtaagacaagtagttgttatttttaaagagctgggaaagctgcgtatcatgcaattgaggaggggctgtaggaagttctggtagcagcccctcctacacttaaactttagccaggaagctgattttgcatttgttagaaaaaggtatttgtcacagtacgttcaatttgggaagagtgttttcttgctgtttttgtctaaaatttgaacatcaaaatatccaaatcaacaggtcagatggattgcttgacttgggtgggtacttttgtgtatgttggggatatagaattcccagatgtaatataggacaccacctaaagttttttttcttttctcttttttttttttttttttttgagacagagtcttgctctgttccgcaagctggagtgcagtggtacgagctctgatcactgcaacctctgcctcccgggttcaagtgattcttctccctcagcctcgccagtagctgggattacaggcatccaccagcatgcctggctaatttttgtattttttagtagagacggggtttcaccatgttggccaggctgttcttgaactcctgacctcaggtgatccaactgcctcggcctcccaaagtgctgggattacagtcatgacccaccgcacccggcctaaatttgaatttcaaataaacgtcaaataacttttagtattgttgtttaccttaatttccaattgaactgggattttttttccttctaaatctggcatctctgggtggggcaggggatgaggtgggtgttgacaaaagataatctattattttcagaattcagaatttcaaattggtatctgtttagaacttctattgttctgctcttacctttaacataaatcgctctttttaaacatttttaattatagtattgcctaagtgtaatcttgaacatgggcggtgctgtgagtgctggtgaagacaatgatgagctgatagataatttgaaagaagcacagtatatccggactgagctggtagagcaggctttcagagctatcgatcgtgcagactattatcttgaagaatttaaagaaaatgcttataaagacttggcatggaagcatggaaacattcacctctcagccccgtgcatctactcggaggtgatggaagccctagatctgcagcctggactctcgtttctgaacctgggcagtggcactgggtatctcagctccatggtgggcctcattctaggtaagtgtggaaggagagtctgaaaactcatctgtctcagggaaggaggcatctcctttgacagaaaatgtagtctgctaatggcctgcctgggtcgagaccgcagccttcccagtagttatctgacattgacacatcactgggtggtggatagagggatgagggaggaaggcctgcatgcatctcatgggccccggattctccagagggacctctcctgttctctgtcccctcttcctgtgctgccacagcctgtactgcgcacctgccctctggacagcggaggataaagacagttgtgtaaatcttgaccccactgtgatttctcgatttaattttatcactcattcttccttgtcactccttctctaaatcgatggtaattaacttgaaagtcctttcggagtacttctaagcagtttttgttttgttggtttttttttttttttttttttgacagttgtgccccatcgtctaggctggagtgccgtgacacgagcaaggcccactgtagccttgacctcctgggatccagcaaatcctcctgagtacctagggccacaggcacgcaccaccacccctggctgatgtttaaatgatttttagagacggggtctcgccatgtttcccaggctggtctcaaactcctgggcgccagctctccacctgcctcagcctcccaaagtgctgggattacaggcatgagccaccatgcctggcctacttttttgttttaatactaagagtaatacctgtagattttaaaattagtttcagggatggaagggatttcactatgaagctatttagcctattttccaaacaaatgagttgtgagactgcacatggaaatatggctatttttaataatagcagataactaaggaaaaacatcacttggtgccaaatgctgtgaggggcggggaaggcatctgtttttaactcagtagggtggaaaagttttgccggaggggtgataggagctgatctgtaaacaggaagcaggggccaggctgctgaggcaaagctggctgagaagacgctggatgaaaccagtgcagagaagctggagtctgtattttttctaaatcctgttagaactgacaggatttacgggtggactgtatatgcttgtgaaagaaacgtcaggaatgtggcttggcttggtggttcatgcctgtaatcccagccctttgggaagccgaggtcggaggatcgcttgatcgcttcaagattgcagtgagctatgattgcaccactgcactccagcctaggtgacagtgagactccgtctataattgatttttgtggatatggaatgataattttgttttttttttctaagtctgtataaattggaatttggtgaagttttgagaccgattattttggctttatgctatagattgctaccttcaggtgtaaaagtgtgtagatttttataatgctttttgaccgtaacttctcttcaattgagactgttgtgatccctgtgctttgagaagagaacacagtgcccagattatttatcatttttgaatttgggaattgtgatttcctccaacgtagctgaaaaataggggctatagctaaggtagaaccttggggagaaataggtgatcaagctgactagattagaaatactataggaaagagccaaaatgcttaggaaaagatgacttaaagtaagcctgaaatggtggggcgtggtggctcacgcctgtaatctcagcactttgggaggccgaggcaggcagatggcttgaggtctggagttcaagaccaacctggccaacgtggtgaaaccctgtccctaccaaaagtataagaaagtacctgggtgtggtggtgcacacctataatcccagctactcaggaggctgaggctggagaatcacttgaacctgggaggcgaaggttacagtgagcagagatggtgccactgcactccagtctggctaacggagccagactccatctcaaaaagaaaaaaaaaaagtaagcctgaaatggccttgctgtacttgacatcccctagaagttataaggaaaggccttccaacttgatacagttgcttttctttcctgaatcccctgtttactggaaatttcattggattttgggaggagagaggtctgaaggaaggaaaggcctgttttctgctgtaatggatgtaacatgctgctttgatgcagttgaaggaagtgacttcagggtttgctgtcatggatgcgtgtcttggctgtgtctccagatgctgcagcttttattcaagcttaatagcacttggtgcagagcactccagagtgaaacctcattggcttcccggcgcctgtggatgtgggtctctcatctgacggagttctttactgtgacccccgactgcctttcgcatggcctgagcggcatcctgggtcagccctgttcctgtgcttgctctgtgggctcctctcccctttgctcagggctgtccttacctttgtttgtcatcaaccaggggagaatacagtagctactaagagatggtggctcataagtcacctacctgaaaagtgctgggtgattcggaagcagggcagacctaggagcggctctgccaggggggcctcgctgctctggtttcatgccgtgctccagtgctgagtcccaggtgccgtgttcctgacaccccccggccaccctgtgtcctcctcccctgctagtcatctttgtattaagcaggtgggtcgaggtatttgtgttactactgtttggtgttaagcttcttgggaataggaaccatatctcatatctgttactagaattaactgcttattaagtgtttgatagtgaaggtgaggggtcagtgaaaataagatgagtgggaagaatcaagcgctatttttggtctctggcagagtcgggaattgaagtcggagttgtcagaaggtcttgacgttcagagtaattcaggatttgatgttgtaaacagtgaaaaggggaactctcaggtagggtgtattttgacgaggtaatgttttagcagcagctctgtgtatgaaatacgtggagagaaaagagcagcaggtacagttgtccaaatgggggccagggaagccttggcctgggctggtggctgttgtactaggagggcccacacggtgcaaaggtgtgggatgcacagaaggttgcccatttcttagcatttctgttagattgtagggtccagtgctacatgatcactgtagtagtatatctgtctaccaagtaaagtcctacgtgccttgtgatttttacatgtagatttaaaaagttgacgtgtaacttacccatagtaaatgaacaagtgtgaagtgtgaattctggtggacttttacatatgcatccaccgccatataaactccagccacagcaagatgcagagttgaatcagcaccccaaaaggctcccatgccccctcctcctcctagaaagttcaccagtgttgcatcttccagaaaggtgatgaccgttttgcctttgtcggcaaagatgaattttgcccgatttttaccttcatgtaagtggattcccgcaacagagagacccatttaagttgagtgtcaatactgtgttcccagttaacgtaggggcagttttatatcgggggagcactgtcatcattaagtggacttgtaacatttctcagttgtatttcaaattactgataaatatcctttgatataaaaatgtttcattgtgacttggaagcatagttttatcttaatgatgatgattgaaccctgttttgtgaatattataatgctcacatctgagtgttctgggcaacttttcagggaaaacagaatcgtcttaaatgttacctctggacaaacaggtgaggcctgtgtcagttccatttgcaaatacatgtttcttctttagttcattagtaagacctgaacacttggtttgtctccattttcaaatgattctttaaaagtttgtgagcagagaagcccaggcctcaagtatttacgatgtggtgagccgtgatactgtgatgagacttcaaaactttgtgaatgtctgtagttacacatgttaagtcagacgtgttacagttggtagaagtgaacagatgagcaagagttcttactctggttctacatgttttcttattcttaaaccttttaggtccttttggtgtgaaccatggggtggaacttcactcagatgtgatagagtatgcaaagcagaaactggacttcttcatcagaacaagtgatagttttgacaagtaagatgaaatactatccattggctcagatgatgtgaactgtaattttacaaagttttgatcagatagaaagaaatcatgtggtaggaaacataattaaactgtggtgggatgattctatgtgcctgttctaattttcagaaaagattctgtgttttgagggttttagggtatttcaaactgttacacatacataaggtgttcatttgctcaatattcatgtttcctgttgaagacaactgtttaccacctagtttttcctaaaataaaattgttgcatttgtctctaaacagtatatgtaactagcttttgccattttaaaagaaggcattaaagttcttattttagggattaaaatttttagaaacaccaagtgcagtttcaccacccccacatctcactcattgtgtagtattaatagatcttacataagatgataagaagatgacagagacagcagcgactggagattgtgtgaaatttggataaaacttttgatattcactttcatactattttgtttggtatttctagagttctagttatatagtataattctttttggaagtaattcttggacatttgtaattcttttcttccagctcctcacactgtaaactgtgttacattgctgtgggattttaacctgtggttagcatagatttactgtatagacttgttgcaatgtgatacttttagttgcaggaagcattttttacttccaggtttgacttctgtgaaccttcctttgttactgggaattgcctggagatttctccggattgttctcagtatgatcgtgtatactgtggggctggcgtgcagaaagagcatgaagagtacatgaagaatcttctcaaagtgggagggatccttgtcatgccactggaagagaaggtcagattcccttcataactgacatttctgcacactgtgtgccaaggtctgttctgggcagtgtacggatacttactcttttaacaatttcctgcatttcacaaatgaggaaacagaggcagggacaggtgagggagatgcagggtcacgcacatgccctagctggggccagaagctgactcaggtgggtgcttcagagcctgcacgtgaaacgcttttctccaccttccttctctgtctctctctttttccttcttctgtcccttccccctcacctccctcttccttccccttctccttccccccagctgttctgagttttaattctaattgttaatctattataattgttctgctgttagaattatatataaaatagagtcattctattctcatcattagtctaattgttacatgccttgatgttatgcatttgacaggaatcctttgcctagtgagagtcttgtccaagtttgctgtttggtcatgcttgtttgtctgtgttactgtatgtcactgggaaaaatagtttatagtaaatgaacagattaatcagacatgaattggtcaccaagaagaatgtctcccagtcacaaagaactaggaaaacacaaataataaaaattaggaggttttaattgttttaataaaaatttggagatgagatcttgctctgtcatccaggctggagtacagtggcatgataatagctcactgtaacttcaaactcatgggctcaagtgacccttccgcctcagcatcccaagtagctggcactataggcacgtgctgccatgcccagataaatttattttttaaatatttatttatttatttatttatttagagacagagtctcgctctgtcgcccaggctggagtgcagtggcgcgatctcagcttagtgcaacctctgcctcctgggttcaagcgattcttctgcctcagcctcctgagtagctgggattacaggtgcgtgccaccacacccagctaatttttgtatttttagtagagacagggtttcaccatgttgttcaggctggtctcagagctcctgacctcatgatccgcccacctcggcctcccaaagtgctgggattacaggtgtgagccaccgtgcccggcctaattttatttttttagtgatgggctctcactgtgttgcctgggctgatcacaaactcctggcctcaagcaattgcctcacctcagcctccagagttgttggcatgagccatcacacctggcagaatattgttttaaatgtctttgcttatacaagtgatattacagatctttgttgctatacaaaatgcattggattttttattggaattgtatcatctcgataatttgaggattgtggccatctttacaatgtttcatctgcttatctagaatatgaaataggggtttatatagttttatttaaggttttatacatcatttattgattctattgaaatacttgtttttcattgtaactagaaattcttttaaaaatgtttaaataaacatatgttttgctggtatacaagaatgtttgttgatatttacttagtacgtggcgacttaatccttttagttataagattcatgacatagaatcttagtttttagaggatttactgacttagatatttttagaaaaggccagcatataatcatagcatgaaagaactgaccagaaatagttttgtgacctgtgtaggccacttggagactgacccagccacacagagtgcacagagggtcatgtctaattgtggtctctggtgctcgtaatactttaattcaaaagaaatgttttgatggcctacactggagtgtgttaagccaccagattccggtgctttcgtgggggtgatatcagggcaaggctcatttaaacacttcagtatttgtctccaaagcatgaggataattgcccaggcatccaagatgacaagtttgcatttaaaaaagtaacagggattctgtaacagtatctgttactacagtgcctatcaggacttagccaccctcccaataacaacaggtcaggattcagttggttggtaacgtatctgtaattactttttgctttagaacagacccccttttcaccctcaatattgacttttttggagagtgctagagcattgtcttataagaatccccacactgtctatgtggttgtttcctcttgctatcctataactagtttctctataatatatagtttctgtaaacagaagttaggcctagggcctgaatatattcaggttagcatctttgcaggaatattcataaggtagatgtacttcatggcacatcacattaggggtccgtatgtcaagatatttcattttattgtaagcatttctatgtatttttatagtatgtataggaatgattaaatatgagctaaatagtagccaattcttttgaatattctcattttgtctctgggatagttgactaagataacacgcacaggtccttcagcttgggaaaccaaaaagattcttgctgtttcttttgctcctctgatccagccctgccattcagagtcaggaaaatcaagacttgtccagttacgtaagtataccaatctttacttattttatcttttagatcttttctctctggttagattttaaaaggaaacaaaatttacaacaaaccttttgatattaaaaagcaccactcccatgctgaaactgtaaaattctacaagcaatttcaggcattataaaaattataatctatttttaacctatttcaggtaattttagccgtcttttaaatctacaaagagctgttgccggtcacaccattgaaagccgaggacgcacataaaagggagctcattttgccatgtgggagacttagcctatttgccgcctccactgggaggggcttacagaaagagccatcagccagagggctcctacagagtcatggggcttctgctccccagggcgccaagcgcctgctgcctcatgggtagacaaggttagagaacacattccagctaatctgctggggtgtggataggagactttccgtggaaccttacacagccgagcctttgtgtttcactatttcaggatgcaaactgagcaaggaactgataccagggccagcacgacagcaaaacctcctaatgttttaaaatttaaacggctcacacagaaatgagagttccaattgattttatttaaaataaaactatcaggatgctctctgatcatttagaaaatttggaaaatgcaaaaaataataggaagggaaaagttttgcatagtcttacaaaaaaaaaaaaaagttttgcaaaaagttttacattttggcaaatctcttccagaaaggttttttgatttattaggaatcacctatgaaatgattacactttgctttggtctctactaagtacaggttctaagaactagacacggttcttgaaatttgataatgagcaacaataggacatgcaaaacggttaattagggaaggtttggcagagggtgatgtctgtgcttggccttcaagggcaaaaaggagttccctaaagagagaagaaaggggagaaaagtaccagcagtggcaggacataaatcaaaatgcgtgttccccgtgtagtcagagttgggactgatgggagaaactactggtatgtaggttagaattgggtttatcatgtaggctggggagagctatcagatgctttaaataaaagatacagtgcctgtgtatcctggataagcctggttgtcgtcgggtggagggtgaatctgtcaaatgcgtgctctgaaagtctcatcagaataaccttttaagtaactgccgcccttggcggggagggcaccagcttccagagccttagcagagtttgggaaggcaggggcatcttcggggtatttatgagactttttgagggtctggttgaaacgagccgttccctgtggggttcgtctggccgatgaagaatcatgacaatgtggtgggcagtttggatgcttgttttgaggagatggctttgaagagagtgttagatgatcaacagtaatgtgatgcttttagagtttctgaagtgacccattgagttacttgcaacttttcttttcctgggccagtttcctatactagtaaattcatgttggtaaagacagtggagtagaaaactctgtgagtgtagacatacgtgatatggggtcatgtgagtgtagatgcgtggtgtggggtgtgtaagtttagacctgcacaatatggggtcaaagtgagtgtagacgtgtgtggtgtggggtcgtgagagtgcggacatgcgcaatgtggggtcatgtgtggacatttgcagtgtggggtaatgtgtgtgtgggtgtgcgcggtgtggggtcatgtgaatgtgggcacgcgtggtgtggggtcatgggtgctggcgtgtggggggtgtgggcgtgcatcgtgtggggtcgtgtgagtgcgggcatgcatggtgtgtggtgtgagtgtggtcctgcacggtgtggggtcccgtgagtgagggcgtgcacggtgtggggtcctgtgagtgcgggtgtgcacggtgtggggtcgtaagttcaggcgtgcacggtatggggttgtgtgagtgcatggcgtggggtcttgtgagtgcgggcgtgcacggtgtggggtcttgagttcaggcgtgcacggtatggggtcgtgtgagtgcatggtgtggggtcgtcagtgcgggcatgcacgttgtggggtcgtgtgggtgtgcacggtgtggggtcgtgagtgcgggcgtgcgtggtgcggggtcatgtgagtgcacggtgtggggtcgtgtgagtgtgggcacgtgtgatgtggggtcatgtgagtgcggatgtgcacagtgtgggatcgtgtgagtgcacagtgggttgtgtggacgtgcacggtgtggcgtcgtgagttcaggcatgcagggtgtggggtcgtgtgaatgcgggcctgcacggtgtggggtgagtgtgggcacacgtgatgtgtcatgtgactgcggatgtgcacagtgtgaggtcgtgtgaatgcgggcgtgcatggtgtgcagtcgtgagttccggcgtgcacgatgtggggtcttgtgagtgcgggcgtgcatggtgtgggatcgtgtgagtgaagatatgtgtggtgtggggtggacgggttagctttcagattgaatggaagcaggaacaagtggaaagctgttgaaattttccaggcgagagataaagataaaaactaagacactggctgctacagtggagaagattcagtgatacataaaatggtacagtccttctgaggaagggcacgtgaggtgttcgttgtgatacgtacaatggtacagtccttctgaggaagggcacgtgaggtgttcgttgtgatacgtacaatggtacagtccttctgaggaagggcacgtgaggtgttcgttgtgatacgtacaatggtacagtccttctgaggaagggcatgtgaggtgttcgttgtgatacgtacaatggtacagtccttctgaggaagggcacgtgaggtgttcgttgtgatacgtacaatggtacagtccttctgaggaagggcatgtgaggtgttcgttgtgatacgtacaatggtacagtccttctgaggaagggcatgtgaggtgttcgttgtgatacgtacaatggtacagtccttctgaggaagggcatgtgaggtgttcgttgtgatacgtacaatggtacagtccttctgaggaagggcatgtgaggtgttcgttgtgatacgtacaatggtacagtccttctgaggaagggcatgtgaggtgttcgttgtgatacgtacaatggtacagtccttctgaggaagggcatgtgaggtgttcgttgtgagacgtacaatggtacagtccttctgaggaagggcatgtgaggtgttcgttgtgagacgtacaatggtacagtccttctgaggaagggcatgtgaggtgttcgttgtgagacgtacaatggtacagtccttctgaggaagggcatgtgaggtgttcgttgtgagacgtacaatggtacagtccttctgaggaagggcatgtgaggtgttcgttgtctgtggtagacctgggtctgtgggaggctcaggattctggtccggactggagtagaacctggggagctattggctggcctctgttatttaaagccacagaatggatgtaaaaccaaggactagcagtcatactgagacggtgaaatggtggaaattggaaccttagggagcagcactgggctggatggaagaggaagagcctgcaagagaaaagagctgcggaggtcagagggagcggctgtgccttgggccaggggagcagtgagccacgttccttatcccaagcagactccttggagatctggagaggccggagctgagggccgggaccccgagggcctcggaaggagttgtttcagcctcttggggcaacagccagatcccagtggctctggaagtaatctgtctagatgtgagatgatgaaggaaggaaggatggctgtacttgaggagggagccgggtcacagatggggcaagaggcacgatcgtggtgttgagtgaagagaaaggactgaagacaaaggaagtgccggagcctgtcctggagaaaggagaagggacctcttgtctgtggagtcagaaaagcaggaaaggttgaagggagaaggtgctacttactcactaccaggggcctgggacacaagcctgtttgagggtttctgaagaacagtggagatgctgagattctgtgcaggcctttctgactttggtaataaacgttgtgcacaacacaagagctctccctatagtgcagactgttattatttggagaagttgagtactggaggggaaaagtgatgctgattttcagtttaatgtaattttccctttgagaaatgttgcctgcatgaaatcgtgagctttaattgtcaaatgttctttctccttggtgtgctttggagtttttgtttttcctgaaaaatgtttggatttgcatttccctactttaataaaaatggagcaaatgttcattgtgtaaataactatgaaaatattaacagataaaagaatattaggccgggcacagtggctcacgcctctaatcccagcgctttgggaggctgaggtgggcggatcacttgatgttaggagtttgagaccatcctggccaacgtggttgaaaccccgtctctactaaaaatacaaaaattagctgggcgtggtggcgcatgcctgtaatcccagctactggggaggttgaggcgggaggatcacttgaacccaggagacggaggttgcagtaagtcgagatcacacccttgcaccccagcctgggtgacagagtaagactctgtctccaaaaaaagaatgttggagacatattcactgtattactagtaggtgggtattaatatacacatgaacacagcaaataatagaataatgaaactgggctgtgtcaggaagacaaattgtgacccaggtgttgattccaccactgattaatatagccaagcaatattgcttcctttccctttcaaagttaagaattgatgcatttggaaatatcttttgaaaagtaccatatgattgtaaattagagcactaattgacatttgcttagcatgctctcatattcttgtaacatattcataaatttgccagttaattgaaatgatgctacgggtcttaggtgtgtaggcgttgtggtggtgtcactccgatgcatttgactgtgtctcactcttctgtgctgcagcaccagtggcagttcgcagcctccaggacttggctcgcatcgccatccggggcaccattaaaaagattattcatcaggaaactgtgagcaaaaacggaaacggactaaagaacacccccaggtttaaacgaaggagagttcgccgccgtcgaatggaaacgattgtctttttggacaaagaagtctttgccagtcggatttccaacccctcagatgacaacagctgtgaagacttggaagaggaacggagggaagaagaagagaagaccccgccggaaacaaagccagaccccccagtgaacttcctacgccagaaggtcctgagcctccctctgccagatcccctgaaatactacttgctttattacagagaaaaataagtctcctgtttgaaagggggaaataggaagagcagattgctgagtgtgaagttcgtgctgcctgtgtgctgttgaagggtcacctggaggcagacgttgtggggaagggaactgctgggctcatccacaccatggttttcttctagttcctgattgacctctaaaattctattcagttgtatgatttgtttacatagttccacaagaccttcattgcatagaagattgttttcccaaagtggagagaatcttcatagagaaaaagagaaggctgtttctttttcggctctgacgaaacactgaagtctgcgtaagagagactgtttgatgaccgtccctcatgcaacatgcacggtactcactaaaaatgaaaactgaagtggaaactaacctgtgttgcttataaagtgtgaaagcacaagcttataaatgtataaaatcttttctgggtgtgacgcacctgcgtccaagtttgaatttttatgatatgtaccacttaattactggcactgagtatcactgaatttcttagttttctagtggggaaacattattgagaagccctcccttattttaagtaagttgattaaatcttatgtgagttgccagttgtaatttttcaaaggaaaaattttgatggggtggaggaatgaattgccagataatctttctggaattccgagagaattccaaagagggtttttttttttttttttaggacatcttttgatacctttaaaagaaccactgtcaagtaatccttaaaagaatatcttggaaaaggaaacagattttttcctgtgtgtaagcaataagtgaagttacatttgccctaaccctagggatgattctttacccagttttaaagcccatcatggtattctaaggtgttgacaccctccatcctcagagcaggtcgaaaatattaaatagactggggactctatgatgggcagcctgtgctttttgacttcagtttgctatttttctgtgatcacattagtactgattcatagattctatcttttataattctggagaaaaagatttgttagttttgtaatttttttgtaagaccaaatgtatgtattttagtagctccattgcatgagaagagtgtaactcacactgacttgtgatatcagccttctctgggccttgtgtgtggagagctttctatcttaccaagtggtagggctaaaagaacaacagcctttttggtagtcacatagcagaatgatcagagttacattgcttattccaaaacattggttctttttaaaacatttttttttacccaaagaaaagaataatagaaattactaacaataaatataaattcagagtgttgatataggattcagtatccagagtttatttttaatcttaatcctcagcttcttgggagttgctgggcttcagtgtctctgtggtttcaccagcttagcttgagctctggttattttggatcttttctgctttttttaagtaactgagtcatttttaccacacagtccagtttgcatgtatagctaggaaacatgtattgctctagattgggcagtttaagtcattttaaagaaagttagttcatagttgttgccttttaactcatagtcaagcttcagtctttcaaagagaaatgtgtgattttcatttacttgctgatattttgtagtttggagatccttgtgggcattattctaactgatacgtagacacttacttggaaatttttggacattatattaaatgagtgctatctgtgaaattggttatattaggtggcttgactaatgttttttctataattgtatatggactgcatttttaaaaaaaccgcatttgcctttatgctagattgtaaaaaattatattagaatgcataagacatgtttttccttcatatgctagacttttcctagcatttcgtatttctgtgttgtcagtgtgtgatttttaaaccggaatttggtttaaaaaaaatctggtggtaatatatgtgagaaatactttggtgtttaccttatgaaaataaaggattgtaagtaaagtttcctgcgcaccttataccagaattcagtataatacactactttctgttttcaaacagataaatcataatatagtctgtattatctgtaagatctgtcttgtaaaccacattcttgacaactatttgcttttgagtagtttgtattttaatatgtgacttttgtcttgaaaagtagtaaagccatagacttgtgcaaaacaagtttcaagtttatagatattaagtttgtaatgtgagcatcaaatgtgtatgtaaaaatactttttaccagtctggaacttgggaaaatccagggaatttgaaacatagattttaatgagctggtaaacacaaatcatgtcaataaaggtagtcaggatattttatccttagcattgcttctgcatcctgtgtaggattccaattcttgaatatgttcttttcaaaatcttaagaaaagaaccttttttctttattaacatcatgtgtttactttcagcaaatatttgtattactgcttgattctgtgacagtcacaatagatgtagagaaggcattatttttcattaataaatgtgaaattggaatggacaaatggagaagtggctggctccaagtacataagagaatagggccttgaagattgcggttaacgtttttggcataattttcccacattcaactttctaaggggcagaaaatatttttttttcattctcagttatctgttcagagcacagatgttatttagatcttgaaattctgggaccagtctcccaaagagcttatgttttctcttttattgtatgtgcttgttgggatattttttacattctgccttccaattttttattttggcagttatatattttaagataatttcatgctctctttactgatctctgaattttccttcctgctgtattcgtcagggttctgtagagggacaggactaataggatagatatatatatatgaaagggagtttattaaggagtattgactcacaggatcgcaaggtgaagtcccacagtagggcatctgcaacctgagaagcaaggaagccagtccgagtcccaaaacctcaaaagtagggaagctgacagtgcagccttcagtttgtgactgaaggcccaagaacccctttcaaaccactggtgtcaatccaagagtgcaaaagctgaagaactgggagtcctgtgttcgagggccggaagcaaagcatgggagaaagatagaggccggaagactcagccagtccagtccttccgtgttcctctgcctgcttttatcctagtcgagctggcagctgaatagatggtgcccacccagactgagggtgggtgtgcctctcccagtccactgactcaaatgttaatctcctttggcaacagccacacagacacacccaggaatgatactttgcatccttcaagccaatcaagttgacacagtactaatcatcacacctgcatatactgttattttctgtggttgcagtactatagacttttctgaggatcctaattagaatttttaaaaattttacttcatcggaggtgggaacgtggattctggcccttccttgaacaaagaaggaaacggccagaaagaggaagggatgtggggacttactcctctagaggtgatttatcagtttgatcatgttgatctttcatttcttgctgtatctctttttttttttcttttttaactgttgttggagactcacgtttgcctgtctgtaattacaaaccaggctggagtagggacagtcattggccaacctcatagtgggatgaggagagctggtcttcaagccaggggcctggacatatgaagggtaatggtctctgggaatcagtgagcctccttgatccgtctgcagaaaccccttccttctggttccctgctgctgctgggcatcaggatgctctcccaccattcgagctccttgcaaacctcatcctaaccctaaccctgctgtgccccagctctctgtcagatgcccgtcaccaggggctccacttgcaacctgactctgaacaactgtggaccttgtgcttatgtctttcccttctctttctcttggagacagagatgctctgaacaactgtggaccttgtgcttatgtcttttcccttctctttctcttggagacagagatgtaacccattgctccactatgttggaaccagaatgtccaaattagcacttgaggttctgcatgaaagaggaaatagcagaaagcggggatagagtcatagaccacacgggcaggacgtccctttgacctaggagggccctgggcagctgggcactgggtggttagagcaggggtggagtcatagaccacacgggcaggacgtccctttgacctaggagggccctgggcagctgggcactgggtggttagagcaggggtggagtcagaccacacgggcaggacgtccctttgatctaggagggctctgggcagctgggcactgggtggttagagcaggggtggagtcatagaccacacgggcagggcatccctttgatctaggagggccctgggcagctgggcactgggtggttaggtggttgttctgatggtcaagagggagaacagcatgagccctgccccaggcctgttgttctgtgtcagagatcagggctgtcttaatgccccatatcccccacctggccagctcccccagactcagagggcagcagcagtaactactgtgccttgatccgctaaggtggtgggggccacccctctgccatcccaggaaacacgcagagcctgggccatcccagcccttgccggtagcctttcctgtgaccagcagggcccagagactgtgtgaggaggtgcttgggtggtagctggtcacaggcagaggcacgggctacatgaggacctccagggggtgttgctcactcctatcaggtagcagggtcactcctgaaagttctagaaccatgacttagccagctgcatcatgtccattttggggaaaataaaatctctggagctgacccttggctgggactggacctcccaagaagtggcacctatgcaatggttagaggtctggtccagatggaggctgaaggctcctcctcacccactccacttggcacctgtggggaggggccactgccctcagcatcctcttcccacagcactgccacccctccgccccaacacttcctcctgtcccctttctggccttatccctggcctctctgagaagagggatgtgatcccacggcctgccctcacctccttaaagggccagcctgggcccagtggacacagttgagacaccatcttgtgcctcttcctgtgccttcctgaggcacctttcctagagattaaagggacataacggctgttccaaagtgttgatagctggaggaggagcccggggagatgtgaggcacggggtttgggcagccctgggttttccaggctccagtgacagcaggatggaggctcagggtcagctctgggtacagtggggtggagactcagggaacatcttcagggaggccacctccaccccatccctcctggtccacagagatctgttgtctcgaagttctgaagtccagagtctggaatgagggtgttggcagggccggccctagggaggcatctgttccagggcctttctccagcttctggtagtttctttgcttgtgacagcaaagctccagtcttcacaaaccttcttccctgtgcgtgtttctgtgtccacattccccttttgataaggacataatcatcatgaatgaagcatggccctaatgacttccgaacttcatcatttgcaaagaccctatttccatataatgccatacttgtaggtactgggtgttagggcttcaacatatgaattgttagggatggaactcaacctataaccttgtccctgcctctgccagtgatctccacattcctgctggccccaaaggcaccatggccccttccagggtgccccaggcagatcacgggagggcctgactgctggggatggggctggtgctgggatcctctgcccagtgagggctgggatgagactattatggggttgggggtgctgaagttttgaaggcagggtaaaacagaggctgggtccctctctggaccccaggctccagggaacacctctcctgggagttcccatgctccctgtggcctgggcaaaaaaaaaaaaaaaaagtacttgcagtccgaggccccccaaaggcaaaagcctggctccgataagcatcctccccaccctgtgtgcctttcgagcccctgaggtttgtggggagtctcagaggttttgtggggagcctcagaccagatcctggtcagcagggttgaggcaggcctgagaatgtatctttagcatccagagattgggagggtgtggacggaagcaaggttcaggcatcctcagctctaactaagtatcaaatactagtgtgaatccacttcctggagctggcctctggggagccttgggttggtgtacataaacagggtctgcctgattcatcaggtttctcatggggcctggaccacctcatgatcacaaaagtgaccgcacagcttcaatgcctctcctgtgtgggctggacacacgttcatctgactcacaaactttccctgggtggcacctggagccctggctctgggctggaacctgagtgtgaagccactggaggctgtgggattgcaggtcaggtgagtcactcagccacctgagcctggccctccgctctgcacaggggactagctatagatagcagggagttcacctgagcaagacaccagcacacgttggtgctcagaaaactctgatttccttttattgagatgggacaacccttggagaccatgtgtcaaggtctggattacagtaggacaaggttcaaagggccctgtgagccctgaggtgttgctgatccctgggtgtctgtgaaggcgagagaaggtgacctggatctggaatgaggaaacggccatgggtttaggagctggcagacatgtgtccagaatgtggttggccaggcctagacagcgctgggctgtggagggccttgaaccccaggctaagggagcatgtgggaagagggctcaccctggtgagggaatgctggggtgggattttgtttttttattcaggtaaaatccacataatataaaattaactgttttaagatgtaaaattcagtgacattgtgaacctgcaaaatattgtgcaaccatcacctcttagttccaaaaccccaaaaggaagccccctacctattaagcagctgctacccaatgtgccctccctccgacccccggcgaccactaatctgctttctgtctctgtagatttacgtattctggatattctccatgaatggaatcatgaagtatgtgaccttttgtgttcagcttcttgcttttagcatgttttgaggttcgtccacattgtaatgtcagtgcctcaacccttttcacagccgaatattatgctgttatagaaatagaccatatttgactttcctgttcatttgttggtggacatttgggctgtgttttgttgttgttgttgttgtttttgagatggagttttgctcttgtcacctaggctggagtgcaatggcgtgccctcggctcactgcaacctctgcctcccaggttcaggtgattctcccgcctcagcctcccgagtagctgggattacaggcacctgccaccactcccggctaattttggtacttttgtagagatggggtttcaccatgttggccaggctggtcttgaactcctgacctcaggtggtccgcccgcctctgcctcccaaagtgctgggattacaggcatgagccaccgcacccggcctgtttccaactttttaaaattgtgaataacaccgttataaacatgtgtatacaagtttttgtttgaatacctcttttccattcttttatgtatatatatctaggaatgaagttgctgggttctatggtaattctgtttagcgttttgcagaaccaccaaactatttcccacagtgtctgcaccatatgacatgcccatcagcaatgttcacgtttctctacttcctgacactgcatgttagtttctgtttctttctttttttgtaataaccattctaataggtatgaagtggtatctttttgtagtttagatttgcatttcatttccctaatggttactgatgttgaatatcttttcatgtgttatttctgtatcttctttggagaaaagtgtctttaattcttctgcccattttgcatgggaggtgggtgggggttgtttgtctttttgttcttgagttgtaagagttctttgtatattccggatactaggccactgtcagattctcagttctcaagcatccaaaatgattaacaaaatgacaatttctagggcttctgtgggagagtatggaaggtctttttgaactttttaatgctgtcaactaaagaatgatgaggttcataaatatggaaaggagagatttctatatttttgtttatttttatttttttgagacggagtttcactcttcttgcccaggctggagtgcaatggcgtaatcttggctcactgcaacctccacctcccaggttcaagtgattctcctgcatcagcctctcgattagctgggattacagaccctcaccactatgcctggctaatttttgtttttttagtagagatgaggtttcaccatgttggccagtctggtcttgaacgcctgacctcaggtgatccacctgcctcggcctcccaaagtgctgggattataggcactgcacccagtgaggtatttatttcctgtaaagggttgcagcctgcagggtagtccttctgataggctgggaagcatagcctccagccagaaactagaaacaagacacttcaaggaagaggtgaaggaaacagtaatttatgctgagtggcatggccaaatacacatctttaataagctctaggcggagtcatgaatatttatgaaaggggaaatgcgtgcatgcacaactgagttccttggttcttcatgggtcccatgtacaaaaaatagcagtgttagcatcatcccagggtggagttttcagccctctgacattaaaaggtgaagcagaggacatgaaaactcgctctgtgcatcctctgtgtgctgtccagaacctctccgtcatgggtggtctcttatcaggcaagaaaggagaggttgatatcagtggtgattttgaaagggctggtttctgttaaatccttagggaagaaagcctcatcatggtttgcaaagcagggggtataatggggtgtacctgactcccatcatcccattctggccaagctgagaactcagttttgaaagttactctggggtcccctcagccaagagtgggtctgttcagtcagctgggagcttaggatttcattttcatttatcaatgctaatgggaatgagcagtctatcttcatggcagctgaatttgcaagaaacttcgtggatggggttaacggcagctgtattttctgggcgctccatggatggggttaacggcagctgaatttgcaaggaactccgtggatggggttaatggcagctgtattttctgggagctgtgctttaattggataaagtaagttctggtaagatttcttccttcatcttcggtatctcaaatgttttcatttaaataatctttataataactcttgatgtctgagggggttcccacacagtcatctattgtaagactttctgattcctttttttcctttggtcattatgaatagggcttctgtacataattgcatggtagcttttgtttggaaatcacatcaaagtggttgtcaaaatacttaggaatgtcgtttttggattgtaaggagagacttatttagctttggaaaaaactgcccaacttgtaataggtgaggaaaaataattttctctctatcttttcagaattcttagattggaccctctgtaacaaatgacagattaaaatgagaaaaatgtagaaaagtttaaaaacatgtataccttatggatacatgggcgatactcagggaaaaatgagtaaatctccagcaggtggttttcaattcaagtgtaaatactatcttcaacttgaagatttgaggcacagtagtggggagttaaccagcaaaaccacattagacaagagtaacgtttgttatgcagactgaagtccatgcgtcctccattgataagactctagtgatttagttatccttctcttcttggtgccgagagagaggtagcttttaaatggggatttcctttatagatgtaaattttccttacagaagggtaacttctactctggttttggaacttcctttgttagcattttttttcaaaataatcatcttggaataattcttatgccaaagggacatattttggggtggcatattctggtcttatacactgtcttccaccagcaatgaaaagagttattgtctttcttgcagcaatttgtgatttttttagagtttagcagttctaatagatatagaccagctgtgctatctcctggttttcagttctgtagtatgttgagcatctttttgtatgtttacttgccatctgtagatcttctttggtgaggtgtctgttcagatctgtgtgcatttttaattgtgctgtttaacttgtttagttttaagaattttttatatattttgaatacaaattctttctcagatctgtattttgcaaatattttcttcaatatgtggcttgtctttttgttctcttaagaaggtctcttccagagtataaactttaaagattaagaaatccacattgtcatttcttctgtgtatatcaaccttttgtgtcatttgttaaaattcattaccaaatccaaaggcacatagcttttcttctatagtttcttctagaaattgtatagttttgcatttttagtgtaaggatgattttgagtggttatttgtgcaagttgtaaagttttcatctacatgcatatcacttcttatggtttccaattaatcattccctcactatttttggaaagacacaggatagtgggctctgttagagtttatatatagctagacatgaacaggaggggagctcctagaaaagggaaagtctgggaaggctcacctggagggaccaccaaaaattcacatattagtagcatctctagtgctggagtgcatgggcacttgtcaattgtgagtaggagggagaagaggtacctatgcagaaagaaacaccctagaactcctcttaagatgccccaatcatcattcactctgcaataaaaatgtcagaatattgctagctacatgctgataagaaggacaaaggggacattcttaagagaaacctggcaccataagtgcagattagggcaaagaaggacattcaaaagagataggcaggcacactaggtacaaacgtgaccgctgtcagcctgcctgggatggcgggaaggaggctggtgccagagtggattcggattgataccacacatgtacctcaaccaacagtgaggaggtcccacaagcctaagtgtggcaagtcggggacctaaggcagtagcaggaaaaccagacaaagagaacaggtggagacttgagacagagacaggaatgtgaagaagtccaaaataaaattccctgcacaggactcctaggatgttttcatgcacgatcagcccactcctccctatttttctacaatgagctctttacactgtatttcttttcaatgaagttgtctgccatttttgtactgcctcttggtgaaaatctttcttccaagttagacaagaactgggacatcagctctccctagtactagctccgtttcagttgaatttacagaactgatggggcttaaaaactgatgctctgactttaagtggtgcaggaggcagccagtaggggacgccaaccgtcacactgggagcaagagacccccgcctagtccccatctgcctgcaggtggcgtgctgcctcgacactgccaccaagagggccaggcagtgtctccagctgccagcaggcggcgtacgacgactacactgtgagcaacagggccctgcagtgtccttagctgccagcaggtgtcatatgggcaccacaccatgagcaagaggaccccgcagtgccctggttgccaacagggggcgtgctgccactacactgtgagcgagaggttcctgtagtgccagcaggtgccagaagagggcgtgcccccactgcactgcaagcaagagggcccggcagtgtccccagctgccagcaggggagccagccgccactacactttgagcaagagggcctggcagtgtccccagctgccagcaggggggtgtgctgccaccacactgtgagcaagaggaccctgcaatgtccctagctgccaccaggcggcgtgccgccgctatactgtgagcaagaggcccctgcattgccccggcgccagcagggggcgctggccaccactataagcaacagagccctgcagctgccctagtcgccagcagggggtgcactggcacagcaccgtgaccaagccagtcctgtagtgcccagctgcaagcagggggcggtcgagcccggcttttcgaattattgaggttcctcccgtctctgcgccacgccgctgcgacgggcgtctccgcgcctgcaccgcgctcccctccccagcacaggggcgtgcgactgtgctcctgcaccacgccaccccaacccaacccccgcccggcagcgtgctctctgcgcatccgccgcgcctcccccgcacgtcgcgccagcctgtgcgcgcctgcgccggcgcggtgggcctctctgtgcccgcgccggcgtggggtgcctttgcgggggcagagctgcgttctgcttaacacagacccggggcacaccgcaaaggtggagcagctttctcagcacacaccttgggggcacagcctcgctttgggacaactcggggccgcatcgacagtgaacaaaatcctttctgtttgcagccctgaataatcagggttagggttagggttaggggttaggggttggggttggggttagggttagggttagggttgggttagggttagggttaggggttagggtttagggttagggttagggttagggttagggttagggtagggtcagggtcagggtcagggtcagggtcagggttaagggtcagggtcagggtcagggtcagggtcaggggttagggttagggttagggtcagggtcaggggttagggtcggggtcggggtcggggtcaggggtcaggggtcaagggtcggggtcaggggtcggggtcagggtgagggtgagggtgagggttaggggttagggttagggttagggttacggttagggttagggttagggttagggtagggttagggttaggggttaggggttagggttagggttagggtaagggtaagggttaggattaggggttagggttagggttagggttagggttagggttagggtagggttagggttagggttagggttaggggttaggggttagggttagggttagggtaagggtaagggttaggattaggggttagggttagggttagggttagggttaggttagggttagggttaggattaggggttagggttagggttagggttagggttagggttagggttagggttagggtttaggggttagggttagggttagggttagggttattggttagggttagggttagggttaggggttagggttaggagttagggttggggttagggttagggttcaggttcggggttcgggttggggttgggtttggggttatggttagggttaggttttggggttagggttagggtttggagttaggggttagggttagtggttagcgttagggttagggtaggggttaggggttaggcttagtggttagggttagggttaggcttagggttagattacaatttctaacctgttttattttgttttttttctgagacagggtctccctcttttgtccaaggctggagtgtggtagtgctatcacagctgactgcagcctcaaccttccaggctgaagcgatcctcccatctcaatctcctacgtggctgacactacaggtgcttgccactatgcccaactaacatttggaattttcgtatacgtggattctagaggggtgacagcgaaacgtgagtaagcatggattttggtatatgcagagatggagggctggaactaattctgtatactgagggacgacgactgtatatgtttttacaattacgctgtaggatacatactgttgcatagccttgaaaataataatttttaattgagtggaataagaataatattgataaaagtagcagctggccaggtgtggtggctcacactggtaatcgcaacactttgggaggctgaggcaggaggatggcttgaggccaagagtttgcgataggccttggaaacaaagggagtcaccatccctacagaaaaatacatgaattagcctagtgtggtggcatgttcctgtagtcccagctacttgggaggctgaggtgggaggatcacttgagcccagggaggctgagactgcagtgagtcatgatcaggcctctgcactccagcctgggtgacagagtgagaccctgtctctaaacaacaaaaaagtagcagctaacatcaactgaccttttactgagtgcctatggataccatagtttaatttcttataactgtttcttattttacttaccaactctgtcttcagttactcccagatttttactgtgtgtgtacagatgaccttttggaggagcctcaacaggcacagctcctccctcatagtggcccatttaggcccaactcatgactgtcgggctatttccaggcctagtgtctgcctcgtggctgactgttgaagcccaaaacttcctcaaatcagccttttgcccaacttctgtctactgtcggactctacaggccagcctctgcctcacagtggaccctccagacccagatggtgtctcactgtggcatcctcaggcgaagctcctgccttttggcagcctctccaggcccagctcctcctgcctcccagtggcctctttcggcccagcccagctcatggctctcggcggccttcccaggccccgcttttgacttttggcagcctcttcaggcgcagaacttgatctccagtcggcctttgcaggcccggcctcctgcctctcgaaggcctgcacgggcctggcctcggccttggcctcacagcggactctccacgcccagctagctctcgcctcactgtggcctccccagtccaaagctcctgcctttcggccacttcggcaggtccagctcctgcctgccagtggcctctttaggcccagctcattcctcacgtcggccattccaggccccgtttttcccttccggcagcctcttggcctctaatttgtttatcttttgtgtataaatcccaaaatattgaattttggaatatttccaccattatatattttggtaggtaatttatttggagtgagtttctgcaccatgcccgaattttttattttattttccttattatttggtgttaaacaggtttaatgacggtcatggcaactttttggcacaatgaaaaatatcgcccatgatcaacgtgttctgttctggggaagggggcaaaggcagggtgaatcactttcttaaaaagtatagctcaagttgggagtgcagagggaatggggagaaaaccctcccgctgcctgtgtcgaagtgcaggagcccccacccccatactcacctgagtccagcccctctggggaaagaaggggtgcatgaactccccctagtccacaggcgcctccctgtggcccaaggccctcttcacactccatcttgtagccccagcaggagctattttccgaaaagtgaaaagctctgaaggtcccacaattcatggtatgtacaggggctcggaggagggaaactgcccagctttcccccggcacagctgcaggggtagggggtatagataagaggagcaggccttggccaggcgtggtggctcacgcctgtaatcccagcactttgggagggggaggcaggcagatcacgacgtcaggagatcgaaatcagcctggccaagatgatgaagccccgtctgtactaaaaatacaaaaattagccggacgtggtagcgtccacctgtaatcctagctacccggaaggctgaggcaggagaatggcgtgaacccggcgggaagaggttgcagtgagccaagatcgcaccactgcactccagcctgggcgacagagcaagactcggtctcaaaaaaaaaaaaaaaaaaaaaaagaggaaggccttactctgtcccaaactgaaaggattaaatggcttcacctgggagaagataaccatcctgccctccattgctacccccacatactgtccatgttctcagggggtactgtgagtcctgggatctttggggttgcccacctgcctgtggtagttatggagacccccaggtgttgaggcagggctggggtgtccccttccaaccaggctgtcaaggccccaactctggggcagaggcagtggcagggcagccagggttgcgccagagcctgagcaggttgaggtggggtcaggcagggctgggagtcagggcaggggcagcagcagtggacccgctatgcacacatcttcttctccaaggtttgtgtgcagaacatcctgcccatgctgacccaggagcttcagttggcacctgccccagtccagcctctgggaaccatgcagcagctcccagcggccctgcacccaccaccagcatccgtttcacctgcagttgaagatccgtgaggtgcccagaagatcatgcagtcatcagtcccacggagcagcccgcgaggctgaggctcctcccactggaccgccccccaactggcaccactgctgcccctgcccctactctcagcctcacgtgactctcgggcagaggcagtggtggggcagccagggcagcgtcaagagtctgagccaggtgaggtgcggtcaggacccccacagggctgggagtcagggcaggggcagaacaaaccttggaggggaagatgtgtgcatagtgggcctggagggcggctgtggcctagtggacaggaagaagcagtgggcctggaagagctgcatgatcagggccggcactggtccagggcacgtgcagtgaagaggacagctccttctcggtctccggttccctgagcctgtcctcggcttctccacctgtacaggcaaaggggaagctgtccgcatcacacatggcacacttgggggtgttgggctttggactgcagctggaacatcttctcatcttgcatttgggcgcggtggggtcctccagtgtgggatccatgtccgtggggttccctctgccccgaccccgaaagcccagtcagtttctcttcaggctctgctccccgggtggctcagcccagctcctgcctaggaaagccttagtgttgggagggaccctgatgactgaggagcctggtagctccaggtcgcccacactttcaggtctcttgcaccagaaggtggcaggatccattgggaggaaacaggccaccttggaaggtgtccctgggcccccatccccaggggttgaggccgtagggggcccgctctgctgcgttgaccagactcctgggctttgaaggctcctgggcccagtaagaaggaggtgggtgccaaggttgaggaggaagcatccgagtatgtgtaggaggaggacagggtgtgaccatagactgccaaaagctgcaggtggatcgggggaccctgggggctcaggatccagcaaggggcggcaggagtaaaggaggaaggaatgacaggtgcaaataccttcccaccaaagcccttgttgccctctggctcctccccagagctgtccccactctcagtcggtcacccactccttgaacttgagatcggtgtcggtggtgctaaagccatcatcagcaatgacatcatcaccccctcctcctcatggatgaccgtgtgctcctcgtcactcgctatgtcctcactggccatgtgctgggaatgagcagctcacgtgggcggcagcagggctgcccacgggtcacctccctcaccaggggctgcaaagtggcctggagctccatgctgagtagaaggctttgggccagagtatgatgcagtgccagacaccacctgtgtcagttcccgtagtgcctgacggtctatttccctgccgtccaggctgtgtaccccgctgtgggagaaggcttgggccaggctgagccaggttccctgactgtgtgcagccgttctgccccacagaagctgctccttggcatccgagctctggagtgtttgggctgcaactgacaggagttcagaggacgccccaggggcagtggcagtgcccgtctctgatatgctccgctcccacgagcccttgttacactgctgctagcccctggcttgtgggcttggcctctgagctggacttctttcggtccttgttgcaagtgggccaccttcacctggaaggccaggtcgtatttctgcatctcactgggccccagggtgtaccaccgctcgctcagcatctggctgacggtccggttatcctggttggggtgaccctgctgcgccccgccagggcctggtgccgcttgctgaagatcatgagcgccactcatgggccaccagatgtggtccttgtcccatttgttggggctgcgtccatccttctcagaagatgagtcctgttccttgcgcagggcactgagggactgggcctgacatcatctgagtggtagaggcaactgggtgtcaggagacatgatggagaggaaagcatcatcatggtcattctctgtctcactgtccagcagggactcccctgaggggcccagggctcctcctccatggtgggaggtgagcttttaccaggttccaccacccccaaagtgtgtggggttgcgggccctgggctttcagggcaggtggctccagggggccgcccagggtcaacactccctgtcccacctggtggacgctcatgagcaacagctggcaacttggcaggttgttttctctggttgcaggccactgagtgactggcaggttgctgggcctcgtgtggctgcagggaggggtcaggaaggggatggagtaccaggggaacacagccgcagagtgaccttccacattcctccacacgaacatgctgacgccacgggaggcctcactgaacgcaggcctgggggccgagtacttggtccgggcagggggttcctggcaggggctcacacctcctcgccccctcctcagccaaggtggcttgggcccagagaaggggaggttggagaggagcagaaggccaggcctcaagttttgttttttttgtttgttttgttttttgtttttgaaatgtagtttgactcttgtcacccaggctggagtgcagtggcacgatctcagtggccttcatacctgtctaattttttgtatttttactggaggtggggttttgccatgttggccaggctggtcttgacctcccgacctcaggtgatccacccacctcagcctcccaaaatgggattacaggcatgagccaccgctcccaacttcattcctttttacttgaaaaactccgttaagcatttttttaaggtagacctagtggtcctgaatgccctcagctttgtttgtcgaggaaacacgttatttcttttttctttctgaaggacagctttgtcagacatagtattagttgctggcagtttttttctttcagcactttgaatgtattattggattctgtcctgacctgcaaagtttctttaacttttgactatttgattatattgtgacttggtgagtatctatttggtttgaacctctttaggaatctttaagcttcatggatttagatgtctaaatctttcccatgatttaggcagttttcagccattctttaaataagctttcttctcctttctctactttccttctcaaactcccataacctgacaatggtttgcctaatggtgtcttgttggctttcttttctctgtctcttttttttttttttttttttttttgagacagagtcatgctctgtcacccaggctggagtgcaatgtgtggtctcggctcacattgcactccaacctccgcctcctgggttcaagcgattctcctgcctcagcctcccaagtagctgggactacaggtgtgtgccaccacacccggctaatttttgtatttttagtagagatggggttttgtcatgttggccaggctggtcttgaacttctgacctcttaatctgcctgcctcggcctcccaaagtgttgggattacaggcttgagccaccacgcccagccttcttttctcttttttattctttttttctttgtcctctgactggataatttcagaagatctatattcaagtttacagattctctctcctgttgaagtttactattgtgttatatcacccagtctggtcttgaactcctgggctcaagcgatcctcccaccttggcctcccaaagtgctgagtttacaagcatgagccactgcatccagtcagtcccagcactttgggaagctgaggtgggaggatcacttgagctcaggagtttgagaccagcctgggcaacatactgagaacttgtctgtatattaaaaaaaaaaaaaagtctttgggaggccaaagcgggaggatcacctgaggtcaggagttcgagaccagcctggccaacatggcaaaaccgcatctctactaaaaatacaaaaattagccaggtgtggtggcacacacctgtagtggtggtgcatgcctgtagtcccagctactcaagaggctgaggcaggagaatcacttgaactgggagatggaggttgcagcgagctgagattgcaccagtgcactccagcctgggcaacagagtgagactccatcttataaaaggaaaaaagaaagaaaagaaaaattccatatctgagtgtttactcctgagtttttgagattgttattaagatcgtgctctactgtgatgatttgggtttgtttgataatcagaaaaaagcatattcttttgggtgtttagccacactgctttggtgtcacaactgcacattggtttcacagctgcaggacaaattcgagcatcttaaaatgattcaacaggaggagataaggaagctcgaggaagagaaaaaacaactggaaggagaaatcatagatttttataaaatgaaagctgcctctgaagcactgcagactcagctgagcactgatacaaagaaagacaaacatcgtaagaagcaatagtttctcttactattctgagagccttatcattctacatcccatcttcctgtgagattgtctttgtagcatttaactctaattgcagttctctttttaaaaattggcttgcttattgtatattttccccaactaaagcgtgaactcctagcagggcgtggtggctcatgcctgtaatctcagcactgtgggaggccgaggtgggtcgactacctgaggtcaggagttcgagaccagcctgaccaagatgatgaaacgctatctctactaaaaatacaaaaattagctaggcgtggtggctgggacctgtaatcccagctacttgggaggctgaggcaggagaatcacttgaaccctggaggtggaggttgcagtgagccgagatctcaccattacactccagcctgggtgacaagagcaaaactccatctcaaaaaaaaaaaaaaaaaaaaaaggtgaacttgaaggcaggtcctgtgtccatcttttcagattctgtatcccagcacttaggacatagacaaacaagaagatgacaatcaatatttgccaaaatgaaaaaacaaaagaaacatgtaacatcatgtaaaagaagctggttaggtggagaaatttatttaccatagtcttgcttgtggatccagtagtgacttttacattttatatctaaatagacgctggaggctttgttgggtactcataggcataaaatattatgttatttattatagagttaaatgctacaaagacaaatctaattaataggcctattttcctgtttaagttctactcataatttcttcataatttttatgataaaaggttggattttgattagaactcccatgcttttgtgtcagaattaaaactggtattagaataaataattcaaaagctagagaaagagtacaatgagaagccatgagttgcatttgaattataatattatgtcttacagatttggggtatatgctaaagttaccaaagttgtagaaaataaggccgggcattgtggctcacatctgtaattccagcactttgggaggccgaggtagatggatcatttgaggtcaggagttcgagaccagcctggccaacatggtgaaactccgtctgtactaatagtacaaaaattagccaggcgtgatggtgtgcacctgtagtccttgctactcagaaagctgaggcaggagaatcgcttgtacccaggaggcagaggttgcagtgagcagagattgtgccactgcactccagcctgggtgacagagtgctatgagtcaccacacctggtatgagccaccgtgcctggcccacaatgacttttacacatgttgttaaaccatcttacagattttataatttgggggaagaaaagttttactaaatggtcttttaatggaaactctacaagaaccagaatctttgctttgttcacttatgtatccattcctaggcctagaaaaatgcctgacacatagcggcaattattcattgaataaatggacccagcgatagtacattagctatgctatatgcatacattaaagatgtagattatcgactttcaaaagataattaatgtaacttcttactgcttctgaacatgtttgtgagttatattgctgagggacctttatcttctcattctttcatcttaacccagtgttataaaattgaaatcaccaatattattccatatctaaaattaatatctaccttgtaaaaaatatcactctgctgcatttgacaatagactttttaggtaataatgatgcaatccatagggttttttgggggcacagagggattcatgctaacagaacattttattttctattttcccagagctgtaaaacatgaaattacggtagtataaggcatatttttactctttttataattttttctaaaaaaaattagtgtttgttccctatataacttttaactttataggtaaatatttgtctctttcagctccagttttatgtgaaatagagttttcagatgtatgtagcatggaaagttttaatacgtcagagttactgatttttgccattttctcaattatttcttttttatctttagttgatttttttgtagtgacacattttgtttctagtctcatttccttttgtttatattctatgtatatttcgtttttggttactatgagaattacatataacatcctagatttataacattttaatttgaatttatttcaacttaagttcaatcacataccaaaattctactgctatacatatagctctactctttttatgttattgatgtaacaaattatatctttattcattgtataccagctaacagatttacaattacattttacgcatttgccttttaaattatgtagaaaataaaaagcagagttagaaaccaaattacaataggactgtttttatgtttgtttatgtatttacctttaccggagagctttgtatattcatacagcttgcttatttacttatatagttattgcctagagttcatttatttcaacctgaaggacttaacacctcttgaatggcaaattcaggaataaacggattttttttcagttttaaaaaaaaatccggaaatgtcttaatttctccctcatttttgaaggataagttttccagctatagatttctcaattgacaggtttcttaattattttaaatatataatccactgcctactggccttcaagctttctgccgagaaatcagctgctaatgttatctggatccctatctgtgagagttgctcttctctctgagttttcaacattctcccattatcttttgtttgtttgtttttgagacaaataattgtacatattcatgggatacagagtgatattttgatacatgtatacaatgtccaatgatcaaataaggataattagcatatccatcacctcaaatatttgtcatttatttgtattgtgaacagtcaacattctttcttccagttttttaaatttataaacatttaaattttattacagaaatttaaattttttgattctgaaaaagttatatacatatgcaacatcgttttatcatttatttatatatttatgcatctttccttttagttttgacagagattttctatttaatcattatttcaaaagaactcttacctgtatttatttatcaattatatttcccttgttttttcctagtatattaatttatttacttatcttctaaaaatcctccatataatctgtttgtttcctttctataatttcttcaataattagttctgttctattttccattaaaatatttaaatcttgtatgaatttttatcagattagaaatttagggcgtttcttaatttctctatactctagcttttgacttttttttttctgacctaagaggtatttagagcacattttagattttttattttgactaatcatttaaaatgtatactaatcttcaatttaaataaaaaactggtctatagtgacaaaaattacaaatgagcctaactaataaattatcagctgtgtttatatgtataggcatgcacagattttggtaaatatgtacatagtatattggtgagcttatttttgtcgttcttaactcattgtgtagtctaaacgttggggaaaaaataaaatacaataatcagatggcgtgaataagaaaattgttctaatgtttgtaaaccaagcaacggttttaactgctcccctcttcctgattgacttccaaaagggattaatccatattaggtcctgtcgtatatgtcacggtataacatctccagctataaaatggaaatttgagaataactttgctgctactcagatacattttatttcaaaaacatacactaaggtgttgctgttggatctttccaaaaacatattcacacagaactttcaatcacactgagccatatttgaacaatctttcaaggtcagctctggcataagctaacattataccatttaactcagaaatttctgtagtatttgattaatgggtttatgtttgatatgtaatgtaattttctaatgctaaatcaagtggtaattttgttagtcaagttgatttagtggcttgggaagaaagcttttaatgttcccctaatttttcttacctttgacatgatccttcacatgtcttattttgcttagtgatttttcttttttttttttttttgagacagggtcttactctaccacccaggcttgagtgcagtggtgcgatcacagctcattgcagccttgacctcccagactcaagctattcttccacctcagcctcccaagtagctggtactacaggcacatgccgccaaacttggctaatttttgtattttttgtagagacagagttttgccaaattttcaggctggtctggaatttctgggctcaagtaatcctgccttggcctcccaacatgctgatattacagacataagccacagtacccggccagttttctttttttaaaaatctattggttattaatttgaagccttccttttcatagctgtgctccttaattgggagcaaacatgaatggaccacaacttagccaattttctatatacgatctttgccatcctaatttaaaggaatattaattctttcttttcctctttcattccacaaacctgtattgactacatctaagttctaaatggtgcactggatgttgaaaaagttgatgatgagcaagaacaaaattccacctttcaggagacttacagttcaatatgggaaatataatttgttaaaatataaaagtgcaattgtgttacatgctgtacgaagtacatgttgacatgtgagcatataataaatgggctggaggccagaggattgccaaagagaatgggcctcctgctgagatgaaaagttgagcagggattagttggcgaaagtggagggacgaccctttctaggcaggaggaagaacatgtacagaatctctgaggtgtgatgcgacaaagtctatatgaaaaactgaagaaaggtctaatgtggcttaaatacagaagccagtaggagaggagtcgaaaagaggctggagaagtagaaagtgtctgcattctgcaggaacttatattgtataaaaagaatttctctttattctaagtgcaatgtgaagccaatgaagtgccttaaacaggtgatgtgatttgattgaatttattacttcacttaacaaatattcattacatgcccactgtttgtcagatattgctgtagcccctggtgatacagtagggaataaaacaggcaaaaatccctgtcctcttgcagcttataatggactgcaatgtttaatatgtcagaggaggtccacggaggagtgacttctaagcaagaatctgaaaaaaatgaggatatctaaggagggaacaaatggttcaaaagccctataattgcaagcaggcatgatgaagcaattgcagttgtcctgactctcaacaccgtggaactcaaaggagatggaaagattctttctctccctcatatattttctctctgtctatatatatagaatatgagacatttccctaatcattatgtgtaattacaattacatatatatatatatgtatgtaatatataaacatatatatgtaattgtaattacacataatgattagggaaatgtctcatattctactcaaaaataagcaatatagcaattactgttttttacattttacagttacagtttcagagaaagtttgatatttatctaaaatttttcaatgtatgaactttttcatttggcaaaccataattgtacatattcttgggatacagagtgatatttctttacatgtatagaatgtgtagtgatcaaatcagggtaatttccactaatttaaaatgccacctttatgttattgtaatttatatatatactatatatatacacacacacatatatatatacatgtccacatacagtgtgtgtgtgcacatgtacacacatgcatatgtgtatataatgcccagtataagcaatgtgcgcaaataaaattagctaacagagatagtatagagtgagaggagaggcagattaatctttgaggaaaagcacaattttatggctgaatggagaaagctgaggtggtttctaagatggagaataagatgaaaaatgtaagtacgttgtttgactgaattcaagaaagaagggtaaaagagaagaaagtagtggtcttatcattaaatgccacagagaggtaaagataaaaacaacatattgttttgggtttagtaatttaagggttaccaaattccgttttggaggaggaacagattccatgtccactagaatggaatgaacaagaaatggaggaggaaaataggtagtttttcaaaagttttcaaaaatatgaaaagaagaaatgaaatggtacttggaagagattgttgaaatgggagagactatggtggcttgtttagaagcagttgagatagatccaattgagatagagatattgactatataaacaaaagaatgacaaattaatagtgtaatggataacttgactttggcaaatattgtgaatttttgtgaaagtacaactaaaaggcaatgtcactccaataatcaccagagtaatcaatttgcttattgctgtccctttaaatatagttctctggtatcaactaacatgtttttaactaatgatgcttcttaaagaaaagggaaaagacctttttctttctttcagtcttcaatgattcactgcttcatctcgctccaccaaagataaatgaaatctacatctcttatacattaacaatgcatgacaatttataaatagctaaatttttggagctaacttgaagtacctgaatggaatttaatcaacccactaatctccttctcacttctcagttatttatcaagtttatgtcaagggacaaggaaaaattatccaaacattgtttaaaacaatcatcattaattagtaacacttatccaggggggtttttaacctttcccccactcaaggattattctaatgtcagagtagaataaaaaataagtgcagcgatgctgactcttccaagcttaacatttctcacaagtcaattagctttgtactgggaggagggcgtgaagggctgcttgcggtagttgtgtagcagcagcacaatggccgcagacaaggaaaacagtttctaggaattcctcgtatataattttatatttttgacaagattaatgacccatgctcccttcctctccatttctttttttggaattctgttggtatgtagttactatattttattaaaggaaattagccttatctcttattatattttattaaagaaaattattattcctttatatttttattaaaggattttattattattattaaaggaaattagccttatctcttattatatttttatgaccttcaaagtagtgtctctgcttaaaagtgtaccttggccgggcgtggtggctcacacctgtaattccagcactttgggaggccgaggcgggtggatcacgaggtcaggagatcaagaccatcctggctaacacgataaaaccccgtctgtactaaaaatacaaaaaattagcagggcatagtggcgggcgcctgtagtcccagctactcgggaggctcaggcaggagaatggcgtgaacccgggaggcggagcttgcggtgagctgagatcgcaccgctgcactccagcctgggcgacagagcaagactccgtctcaaaaaaaaaaaaaaaagtgtaccctgaagcacacatcaagcgacatgtagagttcataaattctggccaaatggtcatacctcaaacctcatcagcactaaggctctttacttgcactgacaaatgtgaacgctggggaatttggaaatgatatataatagatatataatatataatagatatataatattatatatgtaatagatatacaatatataatatatatataatagatatatattatatataatagatatataatattatatatataatagatatataatatataactttccatgtgattttcctcttaatttttttctagctgatccatatgaattcctcttattaagaaaaataaagcatccaggattcaatgaagaactatcaccttgttaatcattcagaaacatattgcagacttaagccatttttgatacagatactgaaacaattactttctaagagcaaacttgaaggtatggataaggccctgagtcatcttcctgagctgaatgatagttaagctgaatgtacgtataaaatatgattttctaaccacttgctcgccaacaaggaaaacttttaagtagagcagaacctgaatagacaagacatttctttcttttggtagaaaatgatttaccatcactgtgtagttaattgtagactaggtaattttaactgtgatttattgccggagacattttcttctgtactgtaaagtgtgtgtcaaaaaaaaaaatagcgattttggaggattaggggagtttgataaattgcctgcaattctggcagtatgaactgcatattaatttctctctttctagaacatttttatttattaattccttacaaaaactccctaaactttggaacagctctcaattgcctgtattcttttttttcttattatggtactcttctagagatttggcttgcatctatgaataagccaggacatcttcagaaattgtctgattaaaaacaccaccaatggagtttcattaaatttgtattgatctgactagtgaaacacacacatctatgttgctgaggatattttactgcagtttgagttgtaataatagctctgtttaagatccgtcagtcacttgaatcttctctaaggctttggatgttagaagttaatttgctttcttacaaggccacattctatcttgtaactaaacaactgaattttatgtcttagcgtagatggtttattactttctggtttttctttagtaagaatcctataaaaacactagtatttttctctgagtttaaaattcaacacatgcctactgatatggttaggctttgtatccccacctgaatctcatcttgaattgtaatccccatagcccccataatccccacaggtcaagggagagaccaggtggaggtaattgaatcatgggggcagtttcccctgtgctgttcttgtgatagtgagttctcacgagatttgatggttttataagggattctttcccctttgctcggcacttcttcatgctgccttgcgaagaagctggcttgcttcctctttgtcttccgccatgattgtagatttcctgaggcctcccaagctgtgctgaactgtgagccaattaaacttctttcctttataaattacccagtcttgggcagttctttatagcagtatgaaaacagataaatacacctactatgtaaaacttaaaatacaaaaaaaaaaaacattatctcactaacataggagctaatattttggtgtactttgtttagtattttatattaaaaatatgtacatatatatttatatataattaagaacatgtatgtacaatcgtgcatacatcatgtacatacatctacttaagaaaatagctatgtaatataccattactcaactagattataatttttctccatttctttattgtaatttatcattttctacttttttgttttctcatttttattgcatatttaattatgcaaaaaatacattaaatacattgaaaatatatagtgtagctataagaataaagaacgatggtaaaacaaatgctaatacccactacctgacttaaagaatatgatactatttttttccaattgaaatcccctcaactactcagaattactgctatcccttttatcctttcattaattttcttctagttttctcacatgtgaatctatttctaaatacatttctttattttgcaagtttttggacttcatataaatgtaaccatattgtatatattcttcttcagcttcttactttttcactaaacaatatgttttgctgatacttacattcatatgtacagtaatagttgatttattttaatggctatatattattccattgttagaatacaccaggatttatttttacttattttttttgctggaaaattgggtgtcttttttattttttgatataacaaacaatgttgtaatcattttgtatttacttcctagtccactcctgtaagtttctcttgagtacatactagcaatgaagatgctgagtcactgcatatacatactcacaactttattctataatgtaatattctataaagtagctgtatcagtttatactttaaccagtaatggacaagattttctgttacttcccatctttgttaattattacttttagactctaacttttatcaggctcatggatgtaaaaagcatctcagggtgtttttaatttgcatttatctgctcatctatgaagatgagcttcttttcatataattatgagtcattatttttgttttgccttcttttgtttatgcattttgcttgttctgtgtcttatttttcctgttgatttttgggagttcatatatattctaaatgtatattcactcatatatatgttgcaaatattacagtttatgatttgtcaccttatgatatcatccaaatagagaagctttatattttgatgtagtcatatgttcatttttcctccttaatgtttgtttttcttggttctatgacctaccaaaagtaacaaaaattctcatttatttttaatctaaatgttttaagtattttcctggaattcaccttgaattgatttctattggagataggtatccaatctaatttgcctcatatggataaccacttgttctattactgctgtaacaaatttctacaaactaagtgacctaaaataacacaaacttgtcatcttacagtgtacacaagtcagaaatcaggcatgaattttagtgaactaaaatcaagttgtcgacaggcatgtttctttatggcggctagggtagaatccatatcctggccttttctatcttctagagaacatcagcattccttttctcattgcctctcctctctctttttaaagctggcaatgtcacatttctctgaccattctttcattgtcacatctctctctggactcagctaagaaaggttctccatttttaagaactcatgtgattagactgggcccatctggataacccaggaagatctctccatctcggtttgcatccttaatcacatctgataagcctttattgcattcagtgtaacatattcacaggttccagggttaggcatgggcatctttgcgggccattattctccctaccacattatttgcctagcatctttcattacattgtccatctatttacttactgatttctaatgacatccaaatcagttacaacattttatgtaagcattgtttttatttttatgttattccactagtctatttttctactcatgaattatggtacatgagtttatttttgcaactttaagctcaataacatgttttaagatttcctcaactttctttttccacttcttcagaagttgactcttttggccctttggtcttctatacacattttagaaatgctttgttgaggactaagaggaatgctaagattttgataggaatttcattgaattttgagtatattggcatgctacaatggttagtgttttatacatgaaaataatatatcccttcctcttttcctagtatcatgagatgtttgttaggcagacatgaatattgagttgtatcaaatgtgtttttctgcattattgtggtagtgatgtgatttagctcctttaattagttaatgtaatgaattacatttgtagattgctctaactattgaaacaagcttgaatttctggaataagcccaatgtgatatttattcaacaaatattcattgagtatacctagtatgtaacatgctttaagaatacaccagtgaaccaaacagaaatatctgacattacagaacttaacattccagtatttggagacagacgataaaaaagtgaacatgtatatttacagtttgtcaaggaatgataaatgaagactcttaaagtagatggggaattgggagtgaagtctgtaatttaaatagggtgggcaggaaagcttcacagagaatgggacatttaagaatagacttgaaggacaggcaagagcaatctctatgtttatatgggagaaaaggttccaggcagatgcagtaacaatggcaagtatcctgaagtaggatcatgctggagtttttgtggagcatcaaggaggctagtgtgactgccacagaatcacccaagggaagatgagaagatcagaccagaacagcacttgggcatctaatgggaaaagtttctcaagccatcataaaaatttcacttttactataaatactacgagaaaccatgggatgttttacagtaagaaaggtggcataatatgttacatgttttaaacaaactctatagcttctgagttgaaatagattgtaggggctcatggcagaagcagagggaacatttaggagactactgtaaagaatatcatgaaaagaacaaacaacgctatgtaacatgcttaaatggactgaagaagatgtataaaatcaaaatgatgttaccttcacaccttgaatcagtatgataaacccccctccccaatcacaaaagaaaaactaaacacaaaaaccaggctttggttgctcagacaattttacaggtgagttctagcaaacatgcaaagaacgtttaattgcactgttacagaaattcttctggagacaagaaaatacgacacatcacccaaccaatttcataataacaatgtcaatgtataataacagaaaaagtggatctccgaagaaataaatttatttggaaataaacaagttttataatctgagatatttgtgctatgatcaatcataggtgcatcccaagaggttgaggtaaggaaaatatgtaaagacaaaaagaagtctatgcaagctgttttgaaacaaacatcattggtcacagggtctgatgcaggagctggtgttaacttactggcagaaacagccattgctaggcaagtgttcttgtgagggtggcttatctgaaatgctgcagtcttgaggaattttttatgataggtcctattatagagacacctacaggatgagctggacaaacagagtgtgctgggtgggcagaaatttcttgtgagtttatagaaagtccttgtgatagtgcttatcgtggacacacacacaagatcccctttttcatgacccggctccactttgctttgggtctgatgtaagtgactttgccttgtcattggcaactttcactgtagtataatctgcacattaaagttacctaacaatagtacaaagaaagaaaattaaaggtatatctctttcaaaaatataaaccccaaaattgttaggaaattgtagtgagtataaaagataattcattataatagacatctcaagcttcacagaattctgacctttgctacactctcatccacaatcttttctcctagtaaatggcagctccttctgttaagttgctgaggcttcttattgcttttttcttcaaataacagtcagaactgaacaactgtaatcatcctagtccatacaattgttatattttcatttaaagaagatcaatgtgtggttcttttttatatatttctggacaattctttatattttaatagtcagaatttgatcaggaaaacagaagacatcctatgtattataatgataaaagtttaatattaattagggccttatgctattattggaagagcttggtgaatagatattagaaaagcagctagacaaaatcagaagaggtctgttttatatcagagatcttagcctgagagtctagagtgtgggcacagaacccaagcttataggaatttctgaaaggtctgtaaatcttatccagatggacagtgggagctcataaagaattctgcaagccatcacatctgtcaaacctgctatgtctaatccttaagcctgctttatgtgaagacctcctcttcactcctcacttccagctctcatgagtttctttcataggcaaacccaaacctggaacaatgtgcctgaagacttcgggtgacacagtacccagacttaaataggaggggagccatggtggaagtggccatccagcacagttttcttggtctttactcatagttttgattccttaaaaaaattaaccacattaaaatatgtgtttcataatctacatctaataataaaaatatttaaagtcttttcaagtgtgaatatgctacccatgttgctgctacccccattttgtgtgtgtgatttttgtgtgtgtgttagaagctcatgacctttgaaacctactcttatgagcttgctttgatgatttatttgtccagagaggatttttttttcctacctagcattttggactgctatcaacctgagaccactttgaattaaattctcagcttgcaaatttggaagccacacagattgtatgagttcaggctgaaacctgtttgagagctggattctggctataaactccacagggaacattttctctctccactcagagctgagaccatagggaaatttatttgctagctctctttgaaggtttattttatttatttttttaatttctagtacacgtgctcactgaaggtgtaatacttatgtgagaatctcaaaatcagttgtgttctttgtatgaccctggttttgtttcctcctgctctcttactttcagtgtgtctcattatgtctgctcaatatgtcatcttaaatttcaactgagggtggatcttcttcccagctcactcacatggttcttatctagattcagtttctctccatttgtaggactgaggacctcagttcttcacttagggttggctacaggtaatcatcaatttcttgtaacaggacttacactgggccactgacagcatgccagttggcttcattcaaatgagagggcaagagaaagagagagagggagagggcacaagatgaaattcacagtatcttataatctaatctcaaaagtggcatctcattacttttgttctattctattcaatagaaacaagtacctgggaccagcttatactataggaaagaaattatataagggtataaataccaagaggtagagatcatcaagagccattctggtagcagccacaatatcttatccagaatatttcttattcaggccttcaaatgtgctgtcttttctggtctaatggaaatgaaccttccttccatacaatttcttctcctaaactgtactctggctctcttatcacatacaaacgtctatgttaggtatttgtgtctgtcttgattcttggtaggcttttaaactctgtgaatgttggactgtgatgtagacatcatttcaccacacactctgtaaccaccaaaccttagcagcttattcagtaagcacatacttggctcttaatgagtattgcttaaattgatgaattgaattagtattttaccttctctgttgcttagctaagcagaagaatttgtcatttttttaatttagtgactggttctattaaaagttacctttgtctatatcattttgttatactaaagcacaaatgtataaggtcaaaaaacattctcaagattttgtttaaaccacagccctcagttgtgtatatttatctcttgttttcatatgcaagatttctcctgaaatgggcaacaatttcaagagtttttttcctcttctgaactaagaaaataaatatttaattcacaagtttagaaaagtgaacctgaaaaatcacagggctaggtgggttatgaggcccactggtacatgatagtgttgaatgtggattagaatgaactccgtggattagaatctcagaccataggcaaacatttacttgttttagaataagcacatttgagtctgcaataagtattactatttttaagttgaaaatgtaattggtttctaataataaccatattggctagcattatttcaatcgtgtttaatgttttccaatgtcatttcatgtcagatatctctcttgattcttagtaacaatttggacaagacagcaaatgctattgtccaagttttctaaagaagaatctgaagtgaaatgacatcaagagacctatcaagacctgtatccaggaaaaggtaaatctgagctgaaactgtagcccttgtaaattacctacgtgacataccagatagtgttcatgatccatttagtactctgttctaaaaacgagacaatatccatttattcacttgttcatttatttagtgtttgttcagcccttactgcatattccaggcactattctgactgtggcaggagtgaacaaacaggcatggttcttacttgcatgtaattacagtcttatagtgaaaacaagtgttaaacaacaaaatctcccaattattttaaaattataaacttgattcgatactatgtggccatataattgttcctaatttggttggagaagggaggcagttagggaagccttccctgagttagtgccatttaacctgatttatgatagatgataagtaatttgtcaggggaaaaatactccaggaataaagaacaggtacaaaggtcaggttctgggaagagcttgtcttggtccaggaactaaaaaatgttagagtggctggatctgggaaagagacaaagagttattaaatgaggcagcaggcttcagcaggtgccacattgctcagggccttgtaggccatgctaagtatttgggatgttaatgtcagtacaaacaattgagtcataagcagaaagtaaaagcatgattccatcaaatgttattctctaaacagtcattttataaatacaggttaaatgtgtgtggttccagctactcaggaggtcccagctactcagtattccttttcaacaaatattaggtgcctactattagccaggtacagcccttagctactttgaatgaagcatatattacaaactggcagaatttcttaaacaaagaatctaaagttgtttatacaccataatctcggtattttataaatttcttgaaattatttttatttacactgctttgcagaattttaactggctttgaaataaacaatgacaatagtcctccatgttactagtttcaaattttcccaatacctactaagacattacttaatccacagatttactgtcaatagtttgtatcaaattgtgataacatatttgaaattaatatttcaaattaaagcaaaatcacaaatttatactttatattatgaatgagattcacaaaaggagcatgataatatattctgttgtcatcgcatacaaaataataacatatagagtatgaatcaataatttttcaaatacaaagctattacaattaggaatacaaagaaatcataattaggaatacttctacaatattaacacacaatagtggtaacacttgcaaaatgatggtggtgtttttttgtttttcttttttgttttgttttttttcccgacagagtcttgctcttgttgcccaggctggagtgcaatggcgtgattttggctcactgtaaactccacctcctgggttcaagcgattctcctgcctcagcctccctagtagctggtattacaggtgcctgccaccacacccagctaatttttgtatttttagtagagatgggggtttcaccatgttggccagcctggtcccgaactcctgaccttaggtgatccaccagcatcggcctcccaaagtgctgggattacaggtgtgagccactgcgtccagccagtggtgggtctcatatctcaatgtgggcttttactaactcccgatgcctcagtttcctcatcagttgaaaggaatgaatgaaagatatgtgtttttcatattaccaggtagatgataaggagattttaattttctttttttttttaacttttattttaagtttaggggcatttgttacataggtaaactggtgtcacagggggttattgtacagattatttcatcacccaggtattaaacctagtacccaatagttatcttttctgcttctcttccttttctcaccctccaccctcaagtagaccccagtgtctgttttattctttgtgttcattagttctcatcatttagctcccactcataactgagagtatgctgtatttggttttctgttcctgcattagtttgctaaggataatagaaggtccatccatattccagcaaaagacatgatatcattttttaatggcgacatagtattccatggtgtatatgtaccacattttctttatccaatctgtcattgatgggcatttaggttgatcctatacttttgctattgtgaacagtgctgcaatgaacatttgtatgcatgtgtctttatggtagaatggtttatattcatctgggtatatacccagtagtgggattactgggtcgaatggtagctctgcttttagctctttgaggaatcactattctttgtacaatgattgaactgatttgcacacccaccaacagtgtataagcattcccttttctccatagcctcactagcatctgttattttttgactttttaatgatagctattctgactggtgtgagatggtatctcattatggttttgatttgcatttctctaatgatcagtgatgttgaactttttttttgtatgtttgttggctgcatgcatgtattcttttgaaaagtgtctgttcattccctttgcccaattttaatggggttgattgtttttcttttgtaaatttctttacattcgaaatgttttattattaagttgagctgcctcattcttagtatggtttttcactttaaaaagcataaaggtggacatggtggcatatgctagtaatcccaactactggggagactaatacaggagggttgcttgagcccaggagttcaaggctataatgtgctatgatcatgactgtgaacaaccactgtactgcagcctgggcagagtgacatagtgaaaccatctctctaaaaaaagagaaaatgtaatttaaatctttaaatacatatgtatatgtgtgtatatatgtatatatggtgcatatatcaaaaatagtttgtagtttccattcacagcacatagtaaaatgtcttaacctcctccctcctccctatgtgtgtttttctaagtgtgtgtcttttttaccttaatttttctcttagtgtctcatactcttcttaggtctccctctttcttctgtctttcacacacacacacacacacgcatacacacatgtaccttgaaaaatagcttttctttttcttaaaacttcccaaagctttcataaaattagccctcaggcactcttacgtatctcatccactcttcttcctctctccccttcctgaagccatttgtaacttagtctattacactaggaaggggaagcaaatattcatattattttcttgttatatccttagcattactagacctttgtggtttctatggatgagggacataatatttattaatttattctaaacttcagtcactcataatatacccttttattcctccttcttctgtgatattgggagtgtatagttgtcattgtgacaaaccctttgctgtcagtatctatagtggatggggagaaaaggagggctttgccaatcatcgtctccagtgcatttcccactgtcagcgtcattgtctaatgctgtttgcatccacacagcctaagggaaccgtttaagtgagtgactccctcccttcacttcagcccatcacttgagcatttctctcccttgaaaaaagacaagtggtgcttctaagacttgagtaattctgaatataattgaggactagatgttcctgttttatatcctacagggctggcatctctaatgctgaaagtacaacaaagtgcagtggtagtcactgagtgttcagccatgctgggtcatcaaaataaaaggagatcgtcttcccattcctatcaatggcctcatctctaccagatatataactggaaaaacaatgcatttgcttagacatccacagtgagccacacttgttcggtgttgtggggaaatgatgcagaagcatccttgtttattaaggatccaattttgataggctgaggcatatttttcctcccaagtctgcacatggtcatgtattaaatattaatgagcatcttctctctatcaggctttgggggatatgttcacctcttgggaggtgaacatgataaataagatcctttctctcatggagcattctctccattctttttttttttttgatagggactagctctgtcacctaggctagagtgcaatggtgcaaacatgactcactgcagccttgacctcatggactcaagtgatcctcaagtgatcctcttgcctccacaacatccagctaacttttaaaaaattttttgaagagaaggttttgccatgttgcctcagcctcctgaagtggtgggattacaggtggcaagggaagggaaggatggctatctgccttcaaatatttgaaagggtgtgaaatcaaacagggaaggagtcctgttcagagccccttagaagatgccggggtcagggtggggggtggtgaggcctctcaccttcaaagagcaccttctgccactggaagggtcccaaagtgacagcaaccaccccgcgtcgagccctcactgcgtgccaggcactcggcttgcctgacgctttactggcatcacccctgaattttcccagcaatcccaggagggtggtaccattcgtattccttattttacgaacgggaaacgcgaggctctcactgcttgagatcacacagctagtgaacgactgagtcgagattcaaacccagggccctgctgagaactattatgctgcaccgtaggctgaggagacctacagccctgggaattctaagactgtgatgcgataaaacacaaatataaacatgggaaggccaagataaggctgggagttttaaatttattttttttttgctgaggtgtcttgggtacaaggaagacaggaaaggtggatgctgagtagaatttgtacctcggtgtcaccgtcctcatccccgacccctcctagccgcccccgcctcaatgtccccttcttctccaagggaatctactcgcaccatcacactagccccggctgcggcccgtggaggccgaggagggccgcgcacccagcacccagcacccagcacccagcacccggcccgaaggccccgctgctccccgggctggcggcggcaggagcggcatcgcggaagccccttccgagccccctcgggccgggaacgcgggaggaggcggcgccctgcgccgggaggccccagacaccgtgggcgggcggctgtgcgcggccaggctgcgtgggagcgggcagcggcggcggggggcgctccgcgcgggggttggggcgcgggggttggggaggcgggggcgcccgggccgcgcttcccttcgcgggtgactcagcagccgccttcctcagcggggcggggcgcggcgggggcgcggggaggctgtgggcacgcggcttccccgcgccggggtgcaggtcctcgccgccgcccccgcgaggaagtgcgaggctggacgctgggaggcgcgcgtgggccgggagattccttctcgcctgccggctaccagccggcccgcccacgccgccgagatcccgactccacgttccctccccacggaggagtcggggcagcgcacggaggcggaaaggctttccccaggctggcccggcgagggtcgggggcgcagggactgaggggacaccccaggggggccagctgcacccccgccctcccctcctgctgctcccgggttttacgcactcacggtcggagggagccggctggagatttctggggtcttagatgtggaagtccgtgcagaatttacctcgttctgccccagggcccccgggtacctgccaccttttgttcttgaaagggagagatgcccctctgctgagccagctggagcgtcctttctgtggctcttgccgtgtagaagtcttttttcgtatctaagctcggtccctcctgctgcggtgacccccagacagctctgcttcgccagactcggcgactgggtagagtgggcaagaaggaggaccaagaacgtccccactgagcaggaggggaaatcaaggcccagagaaggggaggggtttccttcaagcttatagctgggggtgtgtgagagaggtgctgacctcagtactcaggagttccggcttctaggtcagagtccagctgcttgaaaagataatattcctccctggtgctgcccagcgcagtgcctctacctgtctctggaaatccctttcaccttctctgatgggttcttaccatgcgttaagtcgcatcaagactgtcggagatgccagatgatgccggttcggaagcatccagggtaaagaccgggctgtgcgcgggaaacacggaggctggacccaagcaggaaattcccacccgctttgcggagtttttgtagtgctgtttttaaatcatcattggttgatttgatgcattgaatgaaaattgtggtagataggaatcattcatcaaggaagaaattgtggaactcccttgtctctctgcctgggatggggcgtgcattcctgattggaggcaggtggttggctggtttgacctggtgcatccaaagccctgagaggtcattggtaccaggccctggccacagctaggccgagatatcctgcagggaaactcacactgcagctttgtgtgtgtctcgccgccccgtacctgagcttccagacactatacctccgtagagttccagtggcacagctcctgtacctgtccccttccacacagccttcttcccaggagctcacgcctctggggcctggtctcccgcatgctccagacagagtgggtatggaggcgtggtagacttgccccattttacagaggggaagaaccaggaggatctggctagccaatggagatgaaacacttcatgcagagaaaggaaaaggaaccgggagtgctgatggcgtgaccaggccaggggtcattgggagatactgagataaagctatgctgatctttgctgtgaagcctatgcatctttagtatagtgtgggttgtcctccaactcccccagcccaagtcagtaacacacagttgcccatgcagagtcgtgcccactcaggtccacaaacgcctgcgcaccacctgctcaccctcccgtcacggtattgacacttccctgaacacagctgatcctgcctggtaaggggcctggaatctgggtgctgctggttcatgaccccggaatccagctctttcctctcttttcccccagagatatggccacaatgccagcctcctttccctcctgccttcataggcccattgcccgcttctcactccacctgctgaggccttgtgtgtgtgtgtgtgtgtgtgtgatgaaactctcactgcagagattttgcagcttcccgggctgacagactggtcagaggctgggggcagagggagtagagggctctccctgctcatagctaggattggggtcggttctgtttattgccgggggcagtcttctcctcacccctcatccgtctcacaccccaaccagcctgaagagctgagcctctgagtccagctttccgcatgggctcagcttcaggacagtgagctgtgctgttggacccaggggtcctcccttctgcccaactcttcctcagccctgataccacaacccacctccactcaacaatccatgagcctgcctgggccctacagatggagagtttatgtattcaaccagtatttatcatgcaccttctaggtgttgagtttgactctcatctcccatccccttcaggctcatgcgacaccaacctctgctgcctgccagctcttcctgcccacatcttcctgccccatagcaaaccccaacagagtcatgtgacatttcaccatccaaaaaattattttaagatcctagaaaggagcaaacaagcttatcacacatcatgatgctctttaacttcttgctttatgtcttccacacatgaagttcgttggaaaagtatcccttctacagcccaaagacttactattccatgaccagtcagtggaagtgccctgtgtccctcccctttccttaccagagccaaacaaggcaattccaattctctgcaaaatttagttgagctaaaaatacatttagactgaactgcctccctcatgagcccttcagctccttagcagcctccttccctggcctttagttaaccactgctaccacagtatcctcccttcttaccaaacccttctctgggagattgctcaaataaactctttcacactaaagtataaaagactgataaggataaatgtgttgatttttcccccttcctaggagaatttgcatttaaacaaggaggataaccttgaagtacctaaagtggtctctgactgtggaattattaacatagttgagatatcctggaaggcacagggacctccctggggttatgggactagctgtaagtttggccttgcacacctgtgaagcagccgtgatgggctcttttggtccgtcgtcacataatgttgagagcagcggatgaagagttaagagaatctgagctctaaacctagttctgacactagctagtctggaagcaacagtcacttcctcctcaggccttagttttctcatttgccaaatgagaattttgaacagtttaccttaaagaatccttctagctctgatatctggttaactccccagtggggctaggagaccctggcccagctcctaaaagcctctagcccctgaagctgtggcttagagggaatggtctgatgccagcacagagcatggggcccttctctgggcagggacttggacaggctgcccccatgaccatagcagcccacctgccagggaggaaaggtgccgctcagcacacacaccagtcttgaagagttacataaccctcccagatcccttattccaaccaaagagcaacagcaaaacagtctgccctccacccccaccccggcacacacacacatcagcagtctttgcctatggtggcctcacagtcacaaacaccctgggagagaattttagaaggccaccatcttttctttttcatttgttttcattttcctggaagatatctcatgtaagaaaagtctttaagagaagaaaacccacaaccacacatcaggcctcttagtccctccctgctgttcttttcagctttctgacctcagagtcctgaaaagtacaggtctaccttccatccctaggaaggaggaacttggagaaattgattcagcctcattctgaagaagtgggaagcacttcctgggttcagatgccatttccctcactctccacttttgtccttgacaagtcagtgtaccttctcctagatgagactgtaattttcctaattaggaaataggggtgattgttctcaccatggggcatcgggtgataactcagatctctttgatatccttaagagaagtgcaaataatcttaaaatgcaacagaagaggttttagttgggcttaaagaagattttgccaactagaaatttgtgagacagcattacagatcacagagggatggtggatttgtgctgctggttgcttttcagggtacgctcaacattcctgtgtctggaatggctaaatgagaatagagcacatgtagaaaggtggcctggcagtgtagaagaaaccctgagcctgcattctagtctgtcactgtcatctgacaacaggtgaaccctttatctttcttgggccctggtttctttttctttttctttttcttttttttgggggcatggagtctcactctgtggcccagactggagtgcagtggcgcaatctcagctcactgcaacctcagcctcctagattcaagtgattctcctgcctcagcctcccgagtagctgggactactatggaccaccatccctggctaattttgtatttttagtagagacagggtttcaccatgttggccaggctggtctcaaactcctgacctcagctgatctgcccatcttggtttctttatctgtagaaatactgcaatgtattgagcacttactatgtaccccaaacagtactaaataaatgatatgtaatttttaaaactttacaagtctttaaggtagatattttccccattttataagtggaaaaacagaggctaaaagaaagtaaacagtgaaggcaacgtctcacagctggggaggtaccaagatttctccccaggcgtgcttgcccaaagcccatgttctcaaccatctggatcttgaacactgtgtgatccagtggttacctgaaattcctttcagcctgaaagatttagctttgcccttgccttactcctgattccctttcttttttatttatttatttatttatttatttatttatttatttatttattttttaggcggagtgtcgctctgtcacccaggctggagtacagtggcacgatctcagctcactgcaagctctgcctcctgggttcacgccattctcctgcctcagcctcccgagtacctgggactacaggcgcccgccaccatgagcagctaatttttttgcattttttagttgagacgggtttttaccatgttagctaggatggtctcgatctcctgaccttgtgatctgcccgcctcagcctcccaaagtgctgggatgacaggcgtgagccaccacgcctggccctgattccctttctttttgttaatgccctcattgactgaaataaagatgaccacccctttcttccatggaaataagcagccctttggagcctctgtgggaacctgcactttgtgcttttccagaagcagaggagcaagttgctacagtggtcccagccttggaaaccctgccagatggcctcacctccgagagtctgctgggtgcagtgagagtgtccccagggcctcttactaagaactccttactaagctgccggcctcacctctgagagtctgctgggtgcagtgagagtgtccccagggcctcttactaagaactccttactaagctgccattgccctgtgcccagggccactgagatatgcttaggctccagtgaaaaaaaatgttcaggcttcccaacaaggcagcttgtccaaaaatctttacatggggtgtaaattcagcagttgagtctctttccagattgtgagccccgatgtttgtcccagcccttccctcttttttaatgttaccctcccttccattccctctccacccagccccgaccccagctgccttttctcataagtgacctttgaaactcgggctgcgcagagatttgctgaatcagcaggaccaactgttgtttcctttgcttcgttttgggccagcaggaaaatgtgccaggatgcctttgtgaggccctatggcattcactgcattggtctggggagagattgggagtgagggaagagggagctggaggctggtaaggaggagtgagacaatcagggtttcccagagaccaggggatgacttggttctcttaaatgcattatttttggatgaaaagaaaggaagagcagtgacctaggccttcaggaaggcaaagggcagcaaatctttgcaagtggtcacactatgccagcttctaggtatgaataaaaagatgcacactcccttctcccagtgagccttcatcctggccccatttcttagaccagaaactctctccctgctggggataggggaagaacaagaggataggcagattgatgagcatgggccatacgatgccacctcagcaaccaggccttctgggcacaaggtagacaaagtccctgtgtgttgagactgtcctcacctagtgatagggtttggcctcatgggtagggacttaggatgagcggagggctgtatcatcagaggctggaatgaaatggacatgcaaaacagttatctccatagattgaattttctgctttctgttccctttccagctatccttgcctcttacaattctgacataaacctttgacttcaatgaagaaaacctgctctttggccgttaacataatttgtatactcaccctttttaccttgtgctgttctgatagaggattgctttaggcagctgcaatatgcttacacttgtttaggcatttctagatatgtgtctcttttattttgagcaaggactgtttgcttctttccaatctttccacagcactgagtgcagggttttgaatagactggatacttcatacatatagttgactgacagaccttcacactttctttcttaatagtttccaggatgggccagtcatgagctatcaccttcaagcatgcaactctgactcaataggagcagagatcccagttcccaccagcatcttagacaaatcaggctaaaaagcacatccagaactcttctagctatccccagcctccagccagtatgagaacagggagctcaaaagatactcaagattgattttgtgtttaaaggataagggtagagaggaaagagatttccctgtgtagcttatgtggaagaaggatagaaggaagagaagatgggagagataaagtgtttgggggagaggtagaaggggagaagagaaggaaggaaaaagggtagtgaggcagaggagggatgtgaaaggaagaaacaatgtaacagagagaagacaggagctgtggagcccttcagacttcatagtcatattgaggttgggatttggagtaggagatgaatttgaattgggatgcaagaatttatcctccagcaatcatctgcctgtggccttggagacatggacaagtcctgtcatccatggacactaaacgcatgactggtggttgggcaaatgtgcttagaagccactgaagccagcagcttcagataagttcatgtgcttccatggcaagaggatttgtcaggtcaagttgaggttctggcaccagccaggaaagggatagtaataaattctgtagatgcctgagccttgactgaaaaaataaagaggaggaagctatgtttgctgctttcattaagaggcaaaagcagtgggggtcagagcttagcaagaatcaagaagcatgcagagaaataattttaacccttcaaatgtttttcttccataatatctctacattcactcacccacatattgctgctttcttggactgacctccaagaccaccacctttgtgtctccctcagctgaaggagggagagaggccagactatgtattaatacagataagacggcaattaaatgattcattattttccagttccagttctctagggcttctgcctctcctcgaattgggtaggaagaggagttctggggataaaagtcaaactgtgtgaggacataatgcatctaccagagtgcctggcctctggaaaccctcacccactcttcagccacctcagtggggcgcgttcttgctgaaatgaggccagaggaagaatgagggaggattcacaggaaacccatgatcggaagacccactgtgccatctcttcctcccgcttcagcactcccagtagagaaccagttctgcagggagctccccaggaacaataccagggagggggctgctggctctgctctcctcttcctcacctctccctctccatggagatctctctctgcctgctggctccatcttgtcctgcatcatggacaactatgggcagaggagaacaaacatacaaaacgggccacgggcagagagcagggtaggatgaaacatgtcattagcaatggtgattccgtcctgagctctgtggggaaattggtgttgaagttgggccactgtggggaaagaaatgagtggtccagaagatattcaaccagccaagattaccatgttttcacatctaaggaaagagagctgcagggatgaggggaggcgggcacatctatggtctctatgtttctgggtgtgcaggcttggggagcaggagaaaaaactggagaatctggagaaagtaagacattactgttaagtgcctggggcaactttctaagtgaaagattccaataacttccactctgctccaccatgctaattatttcttatttttgttctgctcctttgggaagcaaaagcaggacaggtgagaaggaaaggtgaggatgttataactcctctccagaattgacatgtggggctggacaggagcccagatgattcctaaatcccaggattcttagcaggaccaactgagtgaaagggtttgggttccgtagaccactctgaaggccatggctatgtctttgtctaagaaaaataatctttcctcaactcttcttggccacacagtgccctgaagagatgcaaagaaagtggagttgcagtgggagagaaaggagacaccaaaagtcatgaggagagaaatcataatgaccaggtagctgtggctgccctcagggaaggggactggaaaaattcatcccctcatgtgggggaaaagaccacttagtatcttggaacaatgttgccttttgctgagccttgggcattgagggaaaactgactttctgctttttatgccagataaggaaaaaataaaaataaaaatgtgaaactgagggaagtacaaaggggttttgagggagttggggtagaaaactgtatcttcttgggacttgaatcaaatgttttaagtctgccaagccagatcatgttagaccttcacctcttagatcctgtggttttgatcaatgtgctctgtgagctaccctgccctaacccaacttctctaactctaccacagatggtaaaagaaaatgagttttgaaggaatacagcaaatattcacaagtatctcccagacttaatgcacctggatgaagatgagattctcagctctacttccccctccccattcccttatgtatcaccattgtcaaggtcaggtgctgaccagggacaatttcccttgaactgttctttatttagttctccatcacttgcctaatcagagaaaagaagcggacatggccacagcctttccagtacagaggagagaacatcccagacactttcatatcttcttcccatattcctagttcatggacctcctgagtgaagaaagagcttgaagttctaggaactgagaggttaacatttctctcaggacccaaggcaagatttcagtgatcaccagataaccgggaaaaaagggtttgcagttgctggccttaacggggagatttaaacaggcatggcatctgaataccaactccatctgccaactgtcccccatgtcattgctccctttcaacaacggccaaacaccctgtatgaaaaaccctccttgagttggaggaaaaagctgtaaccagactgagtcctcaagccatgcctgagtcctccattggtttgatgggatgttcccttgcacctcttcggctctgcgggaattcagaggaagggtgtccaatcaggtcagagaagagaaagcttccctaaatgagccactcctagctgtggctcccacttcaccagctaaagagccacattttctcttcctctgcctccagctcccttggtttcccacatcactcctgcttttcaggtttgtccccggcctcctggattcccctctaccccagtcctactcttcctgggccccagcctttttaaagctcttcacatgcctcttttcaagccttcagcttttctcacatctcagtctccatgcaaatacttttactacccaaacttccttccaaattttttctcacttaaaaagattccttcaatggttctcttttctacagtttaatcttcactcgaacttcaacccagcctaaccccgtttaaatgctgtcagttcccagtatcaccaatcgcttaacacccacttccttcctcctttgctcctactaatggtctggttactcctttttgctccagcattccccaaaaccttctcaagcagggatatcgttccctcatttacccaaaatctcctttgcacacttctggcgccttcaggccacatcactccggtcctttagactcctacgcacccaacgtccccgtctctccctcacacccacttgcttcccttgctcccaccacaacagtgcccatctcccctccccgctcactcaggtctcctgctcaggacgcccttgccgagggcggagggggatttgtgctgaaggagggctccggcagcagcgcagcaactcgggggacgctccttctccttgtcagtcacggccccttgtgtccccagatgcttctggggcgactggggtgtgtgagccctgctgccagggccccgctggggctgctccaggagctgtccgtggtgctgacgcggcggccgatcgggcgcgggatgcggcgcggctgctgagcgctgtccctggtcctggagaggttcctgggccctggcggcggcggcaggagcggtggccggagcggccggcagcggggccgatgacggggggacgagcccgggcggaggctgggcttgcagcagctgctggtgctcccacaggctgcggttctcagtgctcagctcgtccagccgccgctccagctcgtcgatacgctctcgctgggtgtggatgaggctctgctgcttctgcacgatggccgtgagctccttgaggcagagcacggcgcgcaccggattctccagcaggctctccatgccgcccgccgccgcctgcgccctgcctgcgcctggggtggcggcggggagcgcgagggcgcgggagcccagcagcccaggggtcggctcgcctccctctcccaccggcccagcctccctccccccgccggcgccgcgtcactgccaccccgaccttcacacacgcatcgcggggcggggcggctgcgcaaggccccacccccaccccaccccctacctccagacctccccaactcctcgcctccccacctccctgcctcttggcgtcagcgaaggctctgctgcctgcagggcagagaggagagggaggaggccagcgagagggagcctctgtcggggcgtgggaggaaagcaagataacgcaggcgacccgagaaggacggtgaatctgactggccagactgggaagtaggcgaaggggaagcagcgatactgggaaggtgcggtgggacctgtaggagaagagaaacagaaaagaaaggaagagaaggggagaggccagcagagaggaagcagaaaaagggaaggtggggccaagaaagagaaatgtgctggaggagaggaaggtgtggggccctgaagggacgcgaattcttttttcccaggtccaggccttccagaggctggggttcatctagagacctgctgaggaggggccacactcgcctcttttgctcgcagcaatctattctgccaggggattccctggaacacaagaatcctggggctctaagggaccctaaagagcgtctggtcctgctccttccttcatccgtgacgaaacttgggatgggaaggctgttcctgctgggtttcctctgggagtgagacctcaagacaactgtggcagttcctgatagaaacactaaataaacgaggtcctctgtggcaagggctgacgcttccagaagcttctgaatagatcattctatttgacaaacagttataaaatgcacactattaccaaacactgggctagatggtggtaagagaagcatgaccagaatggaatcttaggctttttgaagcttataaataagtgggtgaaattggtcatgattaactttgacgtatgatagtggtggtgagtaatcaggcagaggtttgcccagagtgctataggagccagcagcttggagatccagggaggcttcttacaggaagtgacccttgatgtgggaagggttttccataaagggaagacagcatgagcaaaagctcagagacattaatcagcatcgattgaatcattcattgatgtctacaataatcaccactcactaggtgcaaagtaatgtaccagaatctatgcaagccacatctagcatagataataagttatcatttctataatcaagttgattccaatctcatagagtagatatgccatgcacatgaataagtaaaacacaactcaagatttctgtaagagctcttcaagccaagtgccatagagttcaggggagggagaggattcatttgactgtgttgatctgataagttctgacagaggtgttattcaagttgggccatgaagaatgggaaatatttcaacaggtagacagaacagggggccagatatgagaaagatacatcaggcagcagggaaaaaactaatgaatggaaatagagcacttggtttaaattaatttggcagggaaatgaccctttccttttcttttcctttactttttttttttttaagtcttgtctgtcaccgaggctggagtgcagtgtggcaggatcatagcttactccatccttgaactcctgggatcaaggaatcctctagcctcagcttcctgagtaggtgggactacagatgcataccaccatgccccgtgaaggaagtgagttgttctttcctcttttataggaatgggatgggaaagaggaagggctatgagtacgcttcgcatgtttgttattgtgttgttccgttcttcacacacatgtccatcaggctccctgtcaaccttccattcccccagggtaggcatatttatgggtaccatgtgcccagtgagctggcccaccccccaccaccacgtggtgccagacttgaatgaccttatgagaaggaacttgtgctctgcacatatattggtttatctgcattcgtgatgtgtttttattttgcttttctcccatttatcttcctagcaaactttctttggtaaagaatgaataaaggaagcttatccacagctgagctcacggttaggggaaacagcacacaggaggatgctttggtagtgaccagcattccagctaaagaatggaggttgggggatgaaacaagggcacacaaaaactcaaactcttttttctgaattttctttgtttgcctagttgatttgctgtccaagaattgggtgcttggacagcaaattagagacgaatacgataagtgaaacagcctgcagcataattatccatggggattgttgaaaatgcagatttctgagccctatattgtagcaggacaagccgcagacaaaattcctcagacaccgagttaaagaaggaaggggtttatttggccgggggcatcggcaagactcctttctcaagagctgagctccccgagtgagcaatttctgtcctttttaagggttcacaactctaagggggtgcgcgtgagagggtcgtggtcgattaagcaagcagggggtacgtgactgggggctgcatgcaccggtaattagatcggaacacaacaggatagggattttcacagtgcttttctatacaatgtctgtaatctatagataacataactgattaggtcaggggtcgatcttcaactaccaggcccagggtgtggcgccgggctgtctgcttgtggatttcatttctgccttttagtttttagtttttctttctttggaggcagaaaatgggcataaggcaatatgaggggtggtctcctcccttaataccagtcctgctgtattggaatcactaggaatggggaccaagaatttttattttaaaaacttttttcattaaaaaaatcaactttgttgacttataatttatatccaatgatatgctcccattttatgtgcacagttcaatgaattttgacaaatgttcatgccctattttagtcagttcctctcatcctcagctccagttaaccactgacttgctgtctgccagtatatgttagttttgtctgttgtggaatttcacataaaaatcatacagtatacactacttcgtgtctttctttttaaattttttattattttaaaaattactatgatgatttttgttttaatagtttctggggaacatgtgatgtttggttacatagataagttcttttgtggtgatttctgagattttggagcacccatcacctgagcagtgtacaccgtacctaatgtgtagtcttttatctcttaccccactcccacccttctcccaagtccccagagtccattgcatcatccttaagcctttgagtcctcatagcttagttcccacttacacacgagaacataagatatttggttttccattcctgagttacttcacttggaataatgatctccaactccatccaggttgctgccaatgccattatttcattcctttttaaatccactcattgattgatgggcatttgggctggttccacatttttgcaattgtgaattgtgctgctataaacatatgtgtgcaagtgtcttttttttcatataatgatttcttttcctctggataaatacccagtagtgggattgctggatcaaatggtagatctatgtttagttctttaaggaatctccatactgttttccatagtggtcgtactagtttacattcccaccagcagtgtaaaagtgtttccttttcaccaaattcacgccaatatctattattttttgatttttaaattatggccattcttgcaggagttaggtggtatcacattgtgtggtgttttttgttgttgttgtttgttttgtttgtttgtttttgagatgaagtcttgttctgtcacccaggctggagtgcagtggctcgacctcagctcactgcaacctccacctcctgggttcaagtgattcgtctgcctcagcctttggagttcaagtgattctcctgcctcagcttcccaagtaccaagtagctgggactacaggagtgtacaaccatgcccggcaatttttgtgtttttagtagagatgtgggtttcaccatgttggtctcgaactcctgacctcaggtgatccacctgcctcagcctcccaaagtgctgggattacaggtgtgagccacgatgcctggccagcactgtggttttgatttgcatttcccttatcattagtgatgttgagcatttttttcatatgtttgttggccatttgtatatattcttttgagaattgttatttatgtccttagcccactttttgatgggattatttgtttttttcttgctgatttgtttgagttccttgtagattctggatattagacctgtgttggatgcatagtttgtgaaaatttcccccactctgtgggttgtctgtttactctgctgattatttcttgtgctgtgcagaagctttctagtttaattaagtccttctatttatctttgttgcatttgcttttaggttgttggtcatgaactctttgccaagccaatgtctagaagagtttttccaatgttatcttttagaatttttatgatttcaggtcttagatttaagtatttgattcatcttgaattgatttttgtataaggtgagagatgagtatgcagatttattcttctacatgtggctagccaatcattcccagcaccacctgttgaatagtgtgtcctttccctactttatgttctcatttgctttgtcaaagatcagttgggtgtaaatatttggctttatttctgggattgctagtctcttccattggtctatgtgcctatttttataccagtaccatgctgttttggtgatgatagcctggtagtatagtttgaagtcaggtaatgtgatgcctccagatttgttctttttctttactcttggtttggctatgtgggctcttttgttccatataaatttaagggttttttttttctagttctgtgaagaatgataatgatattttgatgagaattgcattgaatttatagattgcttttggcagtatggtcattttcacaatattgattctattcattcatgagcatggggtatgtttccatttgtttgtgtcatctatgatttctttcagcaatgttttgtagttttccttgcagagatctttcacctccttggttaggtatattcctaagtattttattttattttttgcagttattgtaaaaggggttgagttattgctttgtttctcagcttggttgctgttggtgtatagcagtgttactgatttgtgtacattgattttgtatcctgaaactttactgaattcatttatcagatctcagagctttttgagtgagtgctcagggtgttctaggtatacaatcatatcatcagcaaatagcaacagtttgacttcctcattaccaatttggatgtcctttatttctttctcttgtctgattgctctggctaggacttccagtactatgttgaatagaagtggtgaaagtgggcgtccttacgttgttccagttctcagggggaatgctttcagctttttccccttcagtataatgttggctgtgggtttgtcacagatggcttttattaccttaaggtatgtttttttctatgtagattttgttgagggttttaatcataaaattttgtcaaatgctttttctgtgtctattgagatgacaatgtgatttttttaacaaaaattctgtttatgtggtgtatcacatttattgacttgtggatgttaaaccatgcctgtatccctggtgtgaaacccacttgatcatgggggattatctttttgctatgctgttggatttggttaggtagtattttgttgaggatttttatatctatgttcatcagggacattggtctgtagtttccttttttgttatgtcctttcctagttttgatattagggtgatactggctttatggaattatttaaggaggattccctctttctctgtcttttggaataatttcagtagaattgttgagaattcttctttgaatgtctgatagaattccgcggatcnnnnnnnnnnnnnnnnnnnnnnnnnnnnnnnnnnnnnnnnnnnnnnnnnnnnnnnnnnnnnnnnnnnnnnnnnnnnnnnnnnnnnnnnnnnnnnnnnnnnnnnnnnnnnnnnnnnnnnnnnnnnnnnnnnnnnnnnnnnnnnnnnnnnnnnnnnnnnnnnnnnnnnnnnnnnnnnnnnnnnnnnnnnnnnnnnnnnnnnnnnnnnnnnnnnnnnnnnnnnnnnnnnnnnnnnnnnnnnnnnnnnnnnnnnnnnnnnnnnnnnnnnnnnnnnnnnnnnnnnnnnnnnnnnnnnnnnnnnnnnnnnnnnnnnnnnnnnnnnnnnnnnnnnnnnnnnnnnnnnnnnnnnnnnnnnnnnnnnnnnnnnnnnnnnnnnnnnnnnnnnnnnnnnnnnnnnnnnnnnnnnnnnnnnnnnnnnnnnnnnnnnnnnnnnnnnnnnnnnnnnnnnnnnnnnnnnnnnnnnnnnnnnnnnnnnnnnnnnnnnnnnnnnnnnnnnnnnnnnnnnnnnnnnnnnnnnnnnnnnnnnnnnnnnnnnnnnnnnnnnnnnnnnnnnnnnnnnnnnnnnnnnnnnnnnnnnnnnnnnnnnnnnnnnnnnnnnnnnnnnnnnnnnnnnnnnnnnnnnnnnnnnnnnnnnnnnnnnnnnnnnnnnnnnnnnnnnnnnnnnnnnnnnnnnnnnnnnnnnnnnnnnnnnnnnnnnnnnnnnnnnnnnnnnnnnnnnnnnnnnnnnnnnnnnnnnnnnnnnnnnnnnnnnnnnnnnnnnnnnnnnnnnnnnnnnnnnnnnnnnnnnnnnnnnnnnnnnnnnnnnnnnnnnnnnnnnnnnnnnnnnnnnnnnnnnnnnnnnnnnnnnnnnnnnnnnnnnnnnnnnnnnnnnnnnnnnnnnnnnnnnnnnnnnnnnnnnnnnnnnnnnnnnnnnnnnnnnnnnnnnnnnnnnnnnnnnnnnnnnnnnnnnnnnnnnnnnnnnnnnnnnnnnnnnnnnnnnnnnnnnnnnnnnnnnnnnnnnnnnnnnnnnnnnnnnnnnnnnnnnnnnnnnnnnnnnnnnnnnnnnnnnnnnnnnnnnnnnnnnnnnnnnnnnnnnnnnnnnnnnnnnnnnnnnnnnnnnnnnnnnnnnnnnnnnnnnnnnnnnnnnnnnnnnnnnnnnnnnnnnnnnnnnnnnnnnnnnnnnnnnnnnnnnnnnnnnnnnnnnnnnnnnnnnnnnnnnnnnnnnnnnnnnnnnnnnnnnnnnnnnnnnnnnnnnnnnnnnnnnnnnnnnnnnnnnnnnnnnnnnnnnnnnnnnnnnnnnnnnnnnnnnnnnnnnnnnnnnnnnnnnnnnnnnnnnnnnnnnnnnnnnnnnnnnnnnnnnnnnnnnnnnnnnnnnnnnnnnnnnnnnnnnnnnnnnnnnnnnnnnnnnnnnnnnnnnnnnnnnnnnnnnnnnnnnnnnnnnnnnnnnnnnnnnnnnnnnnnnnnnnnnnnnnnnnnnnnnnnnnnnnnnnnnnnnnnnnnnnnnnnnnnnnnnnnnnnnnnnnnnnnnnnnnnnnnnnnnnnnnnnnnnnnnnnnnnnnnnnnnnnnnnnnnnnnnnnnnnnnnnnnnnnnnnnnnnnnnnnnnnnnnnnnnnnnnnnnnnnnnnnnnnnnnnnnnnnnnnnnnnnnnnnnnnnnnnnnnnnnnnnnnnnnnnnnnnnnnnnnnnnnnnnnnnnnnnnnnnnnnnnnnnnnnnnnnnnnnnnnnnnnnnnnnnnnnnnnnnnnnnnnnnnnnnnnnnnnnnnnnnnnnnnnnnnnnnnnnnnnnnnnnnnnnnnnnnnnnnnnnnnnnnnnnnnnnnnnnnnnnnnnnnnnnnnnnnnnnnnnnnnnnnnnnnnnnnnnnnnnnnnnnnnnnnnnnnnnnnnnnnnnnnnnnnnnnnnnnnnnnnnnnnnnnnnnnnnnnnnnnnnnnnnnnnnnnnnnnnnnnnnnnnnnnnnnnnnnnnnnnnnnnnnnnnnnnnnnnnnnnnnnnnnnnnnnnnnnnnnnnnnnnnnnnnnnnnnnnnnnnnnnnnnnnnnnnnnnnnnnnnnnnnnnnnnnnnnnnnnnnnnnnnnnnnnnnnnnnnnnnnnnnnnnnnnnnnnnnnnnnnnnnnnnnnnnnnnnnnnnnnnnnnnnnnnnnnnnnnnnnnnnnnnnnnnnnnnnnnnnnnnnnnnnnnnnnnnnnnnnnnnnnnnnnnnnnnnnnnnnnnnnnnnnnnnnnnnnnnnnnnnnnnnnnnnnnnnnnnnnnnnnnnnnnnnnnnnnnnnnnnnnnnnnnnnnnnnnnnnnnnnnnnnnnnnnnnnnnnnnnnnnnnnnnnnnnnnnnnnnnnnnnnnnnnnnnnnnnnnnnnnnnnnnnnnnnnnnnnnnnnnnnnnnnnnnnnnnnnnnnnnnnnnnnnnnnnnnnnnnnnnnnnnnnnnnnnnnnnnnnnnnnnnnnnnnnnnnnnnnnnnnnnnnnnnnnnnnnnnnnnnnnnnnnnnnnnnnnnnnnnnnnnnnnnnnnnnnnnnnnnnnnnnnnnnnnnnnnnnnnnnnnnnnnnnnnnnnnnnnnnnnnnnnnnnnnnnnnnnnnnnnnnnnnnnnnnnnnnnnnnnnnnnnnnnnnnnnnnnnnnnnnnnnnnnnnnnnnnnnnnnnnnnnnnnnnnnnnnnnnnnnnnnnnnnnnnnnnnnnnnnnnnnnnnnnnnnnnnnnnnnnnnnnnnnnnnnnnnnnnnnnnnnnnnnnnnnnnnnnnnnnnnnnnnnnnnnnnnnnnnnnnnnnnnnnnnnnnnnnnnnnnnnnnnnnnnnnnnnnnnnnnnnnnnnnnnnnnnnnnnnnnnnnnnnnnnnnnnnnnnnnnnnnnnnnnnnnnnnnnnnnnnnnnnnnnnnnnnnnnnnnnnnnnnnnnnnnnnnnnnnnnnnnnnnnnnnnnnnnnnnnnnnnnnnnnnnnnnnnnnnnnnnnnnnnnnnnnnnnnnnnnnnnnnnnnnnnnnnnnnnnnnnnnnnnnnnnnnnnnnnnnnnnnnnnnnnnnnnnnnnnnnnnnnnnnnnnnnnnnnnnnnnnnnnnnnnnnnnnnnnnnnnnnnnnnnnnnnnnnnnnnnnnnnnnnnnnnnnnnnnnnnnnnnnnnnnnnnnnnnnnnnnnnnnnnnnnnnnnnnnnnnnnnnnnnnnnnnnnnnnnnnnnnnnnnnnnnnnnnnnnnnnnnnnnnnnnnnnnnnnnnnnnnnnnnnnnnnnnnnnnnnnnnnnnnnnnnnnnnnnnnnnnnnnnnnnnnnnnnnnnnnnnnnnnnnnnnnnnnnnnnnnnnnnnnnnnnnnnnnnnnnnnnnnnnnnnnnnnnnnnnnnnnnnnnnnnnnnnnnnnnnnnnnnnnnnnnnnnnnnnnnnnnnnnnnnnnnnnnnnnnnnnnnnnnnnnnnnnnnnnnnnnnnnnnnnnnnnnnnnnnnnnnnnnnnnnnnnnnnnnnnnnnnnnnnnnnnnnnnnnnnnnnnnnnnnnnnnnnnnnnnnnnnnnnnnnnnnnnnnnnnnnnnnnnnnnnnnnnnnnnnnnnnnnnnnnnnnnnnnnnnnnnnnnnnnnnnnnnnnnnnnnnnnnnnnnnnnnnnnnnnnnnnnnnnnnnnnnnnnnnnnnnnnnnnnnnnnnnnnnnnnnnnnnnnnnnnnnnnnnnnnnnnnnnnnnnnnnnnnnnnnnnnnnnnnnnnnnnnnnnnnnnnnnnnnnnnnnnnnnnnnnnnnnnnnnnnnnnnnnnnnnnnnnnnnnnnnnnnnnnnnnnnnnnnnnnnnnnnnnnnnnnnnnnnnnnnnnnnnnnnnnnnnnnnnnnnnnnnnnnnnnnnnnnnnnnnnnnnnnnnnnnnnnnnnnnnnnnnnnnnnnnnnnnnnnnnnnnnnnnnnnnnnnnnnnnnnnnnnnnnnnnnnnnnnnnnnnnnnnnnnnnnnnnnnnnnnnnnnnnnnnnnnnnnnnnnnnnnnnnnnnnnnnnnnnnnnnnnnnnnnnnnnnnnnnnnnnnnnnnnnnnnnnnnnnnnnnnnnnnnnnnnnnnnnnnnnnnnnnnnnnnnnnnnnnnnnnnnnnnnnnnnnnnnnnnnnnnnnnnnnnnnnnnnnnnnnnnnnnnnnnnnnnnnnnnnnnnnnnnnnnnnnnnnnnnnnnnnnnnnnnnnnnnnnnnnnnnnnnnnnnnnnnnnnnnnnnnnnnnnnnnnnnnnnnnnnnnnnnnnnnnnnnnnnnnnnnnnnnnnnnnnnnnnnnnnnnnnnnnnnnnnnnnnnnnnnnnnnnnnnnnnnnnnnnnnnnnnnnnnnnnnnnnnnnnnnnnnnnnnnnnnnnnnnnnnnnnnnnnnnnnnnnnnnnnnnnnnnnnnnnnnnnnnnnnnnnnnnnnnnnnnnnnnnnnnnnnnnnnnnnnnnnnnnnnnnnnnnnnnnnnnnnnnnnnnnnnnnnnnnnnnnnnnnnnnnnnnnnnnnnnnnnnnnnnnnnnnnnnnnnnnnnnnnnnnnnnnnnnnnnnnnnnnnnnnnnnnnnnnnnnnnnnnnnnnnnnnnnnnnnnnnnnnnnnnnnnnnnnnnnnnnnnnnnnnnnnnnnnnnnnnnnnnnnnnnnnnnnnnnnnnnnnnnnnnnnnnnnnnnnnnnnnnnnnnnnnnnnnnnnnnnnnnnnnnnnnnnnnnnnnnnnnnnnnnnnnnnnnnnnnnnnnnnnnnnnnnnnnnnnnnnnnnnnnnnnnnnnnnnnnnnnnnnnnnnnnnnnnnnnnnnnnnnnnnnnnnnnnnnnnnnnnnnnnnnnnnnnnnnnnnnnnnnnnnnnnnnnnnnnnnnnnnnnnnnnnnnnnnnnnnnnnnnnnnnnnnnnnnnnnnnnnnnnnnnnnnnnnnnnnnnnnnnnnnnnnnnnnnnnnnnnnnnnnnnnnnnnnnnnnnnnnnnnnnnnnnnnnnnnnnnnnnnnnnnnnnnnnnnnnnnnnnnnnnnnnnnnnnnnnnnnnnnnnnnnnnnnnnnnnnnnnnnnnnnnnnnnnnnnnnnnnnnnnnnnnnnnnnnnnnnnnnnnnnnnnnnnnnnnnnnnnnnnnnnnnnnnnnnnnnnnnnnnnnnnnnnnnnnnnnnnnnnnnnnnnnnnnnnnnnnnnnnnnnnnnnnnnnnnnnnnnnnnnnnnnnnnnnnnnnnnnnnnnnnnnnnnnnnnnnnnnnnnnnnnnnnnnnnnnnnnnnnnnnnnnnnnnnnnnnnnnnnnnnnnnnnnnnnnnnnnnnnnnnnnnnnnnnnnnnnnnnnnnnnnnnnnnnnnnnnnnnnnnnnnnnnnnnnnnnnnnnnnnnnnnnnnnnnnnnnnnnnnnnnnnnnnnnnnnnnnnnnnnnnnnnnnnnnnnnnnnnnnnnnnnnnnnnnnnnnnnnnnnnnnnnnnnnnnnnnnnnnnnnnnnnnnnnnnnnnnnnnnnnnnnnnnnnnnnnnnnnnnnnnnnnnnnnnnnnnnnnnnnnnnnnnnnnnnnnnnnnnnnnnnnnnnnnnnnnnnnnnnnnnnnnnnnnnnnnnnnnnnnnnnnnnnnnnnnnnnnnnnnnnnnnnnnnnnnnnnnnnnnnnnnnnnnnnnnnnnnnnnnnnnnnnnnnnnnnnnnnnnnnnnnnnnnnnnnnnnnnnnnnnnnnnnnnnnnnnnnnnnnnnnnnnnnnnnnnnnnnnnnnnnnnnnnnnnnnnnnnnnnnnnnnnnnnnnnnnnnnnnnnnnnnnnnnnnnnnnnnnnnnnnnnnnnnnnnnnnnnnnnnnnnnnnnnnnnnnnnnnnnnnnnnnnnnnnnnnnnnnnnnnnnnnnnnnnnnnnnnnnnnnnnnnnnnnnnnnnnnnnnnnnnnnnnnnnnnnnnnnnnnnnnnnnnnnnnnnnnnnnnnnnnnnnnnnnnnnnnnnnnnnnnnnnnnnnnnnnnnnnnnnnnnnnnnnnnnnnnnnnnnnnnnnnnnnnnnnnnnnnnnnnnnnnnnnnnnnnnnnnnnnnnnnnnnnnnnnnnnnnnnnnnnnnnnnnnnnnnnnnnnnnnnnnnnnnnnnnnnnnnnnnnnnnnnnnnnnnnnnnnnnnnnnnnnnnnnnnnnnnnnnnnnnnnnnnnnnnnnnnnnnnnnnnnnnnnnnnnnnnnnnnnnnnnnnnnnnnnnnnnnnnnnnnnnnnnnnnnnnnnnnnnnnnnnnnnnnnnnnnnnnnnnnnnnnnnnnnnnnnnnnnnnnnnnnnnnnnnnnnnnnnnnnnnnnnnnnnnnnnnnnnnnnnnnnnnnnnnnnnnnnnnnnnnnnnnnnnnnnnnnnnnnnnnnnnnnnnnnnnnnnnnnnnnnnnnnnnnnnnnnnnnnnnnnnnnnnnnnnnnnnnnnnnnnnnnnnnnnnnnnnnnnnnnnnnnnnnnnnnnnnnnnnnnnnnnnnnnnnnnnnnnnnnnnnnnnnnnnnnnnnnnnnnnnnnnnnnnnnnnnnnnnnnnnnnnnnnnnnnnnnnnnnnnnnnnnnnnnnnnnnnnnnnnnnnnnnnnnnnnnnnnnnnnnnnnnnnnnnnnnnnnnnnnnnnnnnnnnnnnnnnnnnnnnnnnnnnnnnnnnnnnnnnnnnnnnnnnnnnnnnnnnnnnnnnnnnnnnnnnnnnnnnnnnnnnnnnnnnnnnnnnnnnnnnnnnnnnnnnnnnnnnnnnnnnnnnnnnnnnnnnnnnnnnnnnnnnnnnnnnnnnnnnnnnnnnnnnnnnnnnnnnnnnnnnnnnnnnnnnnnnnnnnnnnnnnnnnnnnnnnnnnnnnnnnnnnnnnnnnnnnnnnnnnnnnnnnnnnnnnnnnnnnnnnnnnnnnnnnnnnnnnnnnnnnnnnnnnnnnnnnnnnnnnnnnnnnnnnnnnnnnnnnnnnnnnnnnnnnnnnnnnnnnnnnnnnnnnnnnnnnnnnnnnnnnnnnnnnnnnnnnnnnnnnnnnnnnnnnnnnnnnnnnnnnnnnnnnnnnnnnnnnnnnnnnnnnnnnnnnnnnnnnnnnnnnnnnnnnnnnnnnnnnnnnnnnnnnnnnnnnnnnnnnnnnnnnnnnnnnnnnnnnnnnnnnnnnnnnnnnnnnnnnnnnnnnnnnnnnnnnnnnnnnnnnnnnnnnnnnnnnnnnnnnnnnnnnnnnnnnnnnnnnnnnnnnnnnnnnnnnnnnnnnnnnnnnnnnnnnnnnnnnnnnnnnnnnnnnnnnnnnnnnnnnnnnnnnnnnnnnnnnnnnnnnnnnnnnnnnnnnnnnnnnnnnnnnnnnnnnnnnnnnnnnnnnnnnnnnnnnnnnnnnnnnnnnnnnnnnnnnnnnnnnnnnnnnnnnnnnnnnnnnnnnnnnnnnnnnnnnnnnnnnnnnnnnnnnnnnnnnnnnnnnnnnnnnnnnnnnnnnnnnnnnnnnnnnnnnnnnnnnnnnnnnnnnnnnnnnnnnnnnnnnnnnnnnnnnnnnnnnnnnnnnnnnnnnnnnnnnnnnnnnnnnnnnnnnnnnnnnnnnnnnnnnnnnnnnnnnnnnnnnnnnnnnnnnnnnnnnnnnnnnnnnnnnnnnnnnnnnnnnnnnnnnnnnnnnnnnnnnnnnnnnnnnnnnnnnnnnnnnnnnnnnnnnnnnnnnnnnnnnnnnnnnnnnnnnnnnnnnnnnnnnnnnnnnnnnnnnnnnnnnnnnnnnnnnnnnnnnnnnnnnnnnnnnnnnnnnnnnnnnnnnnnnnnnnnnnnnnnnnnnnnnnnnnnnnnnnnnnnnnnnnnnnnnnnnnnnnnnnnnnnnnnnnnnnnnnnnnnnnnnnnnnnnnnnnnnnnnnnnnnnnnnnnnnnnnnnnnnnnnnnnnnnnnnnnnnnnnnnnnnnnnnnnnnnnnnnnnnnnnnnnnnnnnnnnnnnnnnnnnnnnnnnnnnnnnnnnnnnnnnnnnnnnnnnnnnnnnnnnnnnnnnnnnnnnnnnnnnnnnnnnnnnnnnnnnnnnnnnnnnnnnnnnnnnnnnnnnnnnnnnnnnnnnnnnnnnnnnnnnnnnnnnnnnnnnnnnnnnnnnnnnnnnnnnnnnnnnnnnnnnnnnnnnnnnnnnnnnnnnnnnnnnnnnnnnnnnnnnnnnnnnnnnnnnnnnnnnnnnnnnnnnnnnnnnnnnnnnnnnnnnnnnnnnnnnnnnnnnnnnnnnnnnnnnnnnnnnnnnnnnnnnnnnnnnnnnnnnnnnnnnnnnnnnnnnnnnnnnnnnnnnnnnnnnnnnnnnnnnnnnnnnnnnnnnnnnnnnnnnnnnnnnnnnnnnnnnnnnnnnnnnnnnnnnnnnnnnnnnnnnnnnnnnnnnnnnnnnnnnnnnnnnnnnnnnnnnnnnnnnnnnnnnnnnnnnnnnnnnnnnnnnnnnnnnnnnnnnnnnnnnnnnnnnnnnnnnnnnnnnnnnnnnnnnnnnnnnnnnnnnnnnnnnnnnnnnnnnnnnnnnnnnnnnnnnnnnnnnnnnnnnnnnnnnnnnnnnnnnnnnnnnnnnnnnnnnnnnnnnnnnnnnnnnnnnnnnnnnnnnnnnnnnnnnnnnnnnnnnnnnnnnnnnnnnnnnnnnnnnnnnnnnnnnnnnnnnnnnnnnnnnnnnnnnnnnnnnnnnnnnnnnnnnnnnnnnnnnnnnnnnnnnnnnnnnnnnnnnnnnnnnnnnnnnnnnnnnnnnnnnnnnnnnnnnnnnnnnnnnnnnnnnnnnnnnnnnnnnnnnnnnnnnnnnnnnnnnnnnnnnnnnnnnnnnnnnnnnnnnnnnnnnnnnnnnnnnnnnnnnnnnnnnnnnnnnnnnnnnnnnnnnnnnnnnnnnnnnnnnnnnnnnnnnnnnnnnnnnnnnnnnnnnnnnnnnnnnnnnnnnnnnnnnnnnnnnnnnnnnnnnnnnnnnnnnnnnnnnnnnnnnnnnnnnnnnnnnnnnnnnnnnnnnnnnnnnnnnnnnnnnnnnnnnnnnnnnnnnnnnnnnnnnnnnnnnnnnnnnnnnnnnnnnnnnnnnnnnnnnnnnnnnnnnnnnnnnnnnnnnnnnnnnnnnnnnnnnnnnnnnnnnnnnnnnnnnnnnnnnnnnnnnnnnnnnnnnnnnnnnnnnnnnnnnnnnnnnnnnnnnnnnnnnnnnnnnnnnnnnnnnnnnnnnnnnnnnnnnnnnnnnnnnnnnnnnnnnnnnnnnnnnnnnnnnnnnnnnnnnnnnnnnnnnnnnnnnnnnnnnnnnnnnnnnnnnnnnnnnnnnnnnnnnnnnnnnnnnnnnnnnnnnnnnnnnnnnnnnnnnnnnnnnnnnnnnnnnnnnnnnnnnnnnnnnnnnnnnnnnnnnnnnnnnnnnnnnnnnnnnnnnnnnnnnnnnnnnnnnnnnnnnnnnnnnnnnnnnnnnnnnnnnnnnnnnnnnnnnnnnnnnnnnnnnnnnnnnnnnnnnnnnnnnnnnnnnnnnnnnnnnnnnnnnnnnnnnnnnnnnnnnnnnnnnnnnnnnnnnnnnnnnnnnnnnnnnnnnnnnnnnnnnnnnnnnnnnnnnnnnnnnnnnnnnnnnnnnnnnnnnnnnnnnnnnnnnnnnnnnnnnnnnnnnnnnnnnnnnnnnnnnnnnnnnnnnnnnnnnnnnnnnnnnnnnnnnnnnnnnnnnnnnnnnnnnnnnnnnnnnnnnnnnnnnnnnnnnnnnnnnnnnnnnnnnnnnnnnnnnnnnnnnnnnnnnnnnnnnnnnnnnnnnnnnnnnnnnnnnnnnnnnnnnnnnnnnnnnnnnnnnnnnnnnnnnnnnnnnnnnnnnnnnnnnnnnnnnnnnnnnnnnnnnnnnnnnnnnnnnnnnnnnnnnnnnnnnnnnnnnnnnnnnnnnnnnnnnnnnnnnnnnnnnnnnnnnnnnnnnnnnnnnnnnnnnnnnnnnnnnnnnnnnnnnnnnnnnnnnnnnnnnnnnnnnnnnnnnnnnnnnnnnnnnnnnnnnnnnnnnnnnnnnnnnnnnnnnnnnnnnnnnnnnnnnnnnnnnnnnnnnnnnnnnnnnnnnnnnnnnnnnnnnnnnnnnnnnnnnnnnnnnnnnnnnnnnnnnnnnnnnnnnnnnnnnnnnnnnnnnnnnnnnnnnnnnnnnnnnnnnnnnnnnnnnnnnnnnnnnnnnnnnnnnnnnnnnnnnnnnnnnnnnnnnnnnnnnnnnnnnnnnnnnnnnnnnnnnnnnnnnnnnnnnnnnnnnnnnnnnnnnnnnnnnnnnnnnnnnnnnnnnnnnnnnnnnnnnnnnnnnnnnnnnnnnnnnnnnnnnnnnnnnnnnnnnnnnnnnnnnnnnnnnnnnnnnnnnnnnnnnnnnnnnnnnnnnnnnnnnnnnnnnnnnnnnnnnnnnnnnnnnnnnnnnnnnnnnnnnnnnnnnnnnnnnnnnnnnnnnnnnnnnnnnnnnnnnnnnnnnnnnnnnnnnnnnnnnnnnnnnnnnnnnnnnnnnnnnnnnnnnnnnnnnnnnnnnnnnnnnnnnnnnnnnnnnnnnnnnnnnnnnnnnnnnnnnnnnnnnnnnnnnnnnnnnnnnnnnnnnnnnnnnnnnnnnnnnnnnnnnnnnnnnnnnnnnnnnnnnnnnnnnnnnnnnnnnnnnnnnnnnnnnnnnnnnnnnnnnnnnnnnnnnnnnnnnnnnnnnnnnnnnnnnnnnnnnnnnnnnnnnnnnnnnnnnnnnnnnnnnnnnnnnnnnnnnnnnnnnnnnnnnnnnnnnnnnnnnnnnnnnnnnnnnnnnnnnnnnnnnnnnnnnnnnnnnnnnnnnnnnnnnnnnnnnnnnnnnnnnnnnnnnnnnnnnnnnnnnnnnnnnnnnnnnnnnnnnnnnnnnnnnnnnnnnnnnnnnnnnnnnnnnnnnnnnnnnnnnnnnnnnnnnnnnnnnnnnnnnnnnnnnnnnnnnnnnnnnnnnnnnnnnnnnnnnnnnnnnnnnnnnnnnnnnnnnnnnnnnnnnnnnnnnnnnnnnnnnnnnnnnnnnnnnnnnnnnnnnnnnnnnnnnnnnnnnnnnnnnnnnnnnnnnnnnnnnnnnnnnnnnnnnnnnnnnnnnnnnnnnnnnnnnnnnnnnnnnnnnnnnnnnnnnnnnnnnnnnnnnnnnnnnnnnnnnnnnnnnnnnnnnnnnnnnnnnnnnnnnnnnnnnnnnnnnnnnnnnnnnnnnnnnnnnnnnnnnnnnnnnnnnnnnnnnnnnnnnnnnnnnnnnnnnnnnnnnnnnnnnnnnnnnnnnnnnnnnnnnnnnnnnnnnnnnnnnnnnnnnnnnnnnnnnnnnnnnnnnnnnnnnnnnnnnnnnnnnnnnnnnnnnnnnnnnnnnnnnnnnnnnnnnnnnnnnnnnnnnnnnnnnnnnnnnnnnnnnnnnnnnnnnnnnnnnnnnnnnnnnnnnnnnnnnnnnnnnnnnnnnnnnnnnnnnnnnnnnnnnnnnnnnnnnnnnnnnnnnnnnnnnnnnnnnnnnnnnnnnnnnnnnnnnnnnnnnnnnnnnnnnnnnnnnnnnnnnnnnnnnnnnnnnnnnnnnnnnnnnnnnnnnnnnnnnnnnnnnnnnnnnnnnnnnnnnnnnnnnnnnnnnnnnnnnnnnnnnnnnnnnnnnnnnnnnnnnnnnnnnnnnnnnnnnnnnnnnnnnnnnnnnnnnnnnnnnnnnnnnnnnnnnnnnnnnnnnnnnnnnnnnnnnnnnnnnnnnnnnnnnnnnnnnnnnnnnnnnnnnnnnnnnnnnnnnnnnnnnnnnnnnnnnnnnnnnnnnnnnnnnnnnnnnnnnnnnnnnnnnnnnnnnnnnnnnnnnnnnnnnnnnnnnnnnnnnnnnnnnnnnnnnnnnnnnnnnnnnnnnnnnnnnnnnnnnnnnnnnnnnnnnnnnnnnnnnnnnnnnnnnnnnnnnnnnnnnnnnnnnnnnnnnnnnnnnnnnnnnnnnnnnnnnnnnnnnnnnnnnnnnnnnnnnnnnnnnnnnnnnnnnnnnnnnnnnnnnnnnnnnnnnnnnnnnnnnnnnnnnnnnnnnnnnnnnnnnnnnnnnnnnnnnnnnnnnnnnnnnnnnnnnnnnnnnnnnnnnnnnnnnnnnnnnnnnnnnnnnnnnnnnnnnnnnnnnnnnnnnnnnnnnnnnnnnnnnnnnnnnnnnnnnnnnnnnnnnnnnnnnnnnnnnnnnnnnnnnnnnnnnnnnnnnnnnnnnnnnnnnnnnnnnnnnnnnnnnnnnnnnnnnnnnnnnnnnnnnnnnnnnnnnnnnnnnnnnnnnnnnnnnnnnnnnnnnnnnnnnnnnnnnnnnnnnnnnnnnnnnnnnnnnnnnnnnnnnnnnnnnnnnnnnnnnnnnnnnnnnnnnnnnnnnnnnnnnnnnnnnnnnnnnnnnnnnnnnnnnnnnnnnnnnnnnnnnnnnnnnnnnnnnnnnnnnnnnnnnnnnnnnnnnnnnnnnnnnnnnnnnnnnnnnnnnnnnnnnnnnnnnnnnnnnnnnnnnnnnnnnnnnnnnnnnnnnnnnnnnnnnnnnnnnnnnnnnnnnnnnnnnnnnnnnnnnnnnnnnnnnnnnnnnnnnnnnnnnnnnnnnnnnnnnnnnnnnnnnnnnnnnnnnnnnnnnnnnnnnnnnnnnnnnnnnnnnnnnnnnnnnnnnnnnnnnnnnnnnnnnnnnnnnnnnnnnnnnnnnnnnnnnnnnnnnnnnnnnnnnnnnnnnnnnnnnnnnnnnnnnnnnnnnnnnnnnnnnnnnnnnnnnnnnnnnnnnnnnnnnnnnnnnnnnnnnnnnnnnnnnnnnnnnnnnnnnnnnnnnnnnnnnnnnnnnnnnnnnnnnnnnnnnnnnnnnnnnnnnnnnnnnnnnnnnnnnnnnnnnnnnnnnnnnnnnnnnnnnnnnnnnnnnnnnnnnnnnnnnnnnnnnnnnnnnnnnnnnnnnnnnnnnnnnnnnnnnnnnnnnnnnnnnnnnnnnnnnnnnnnnnnnnnnnnnnnnnnnnnnnnnnnnnnnnnnnnnnnnnnnnnnnnnnnnnnnnnnnnnnnnnnnnnnnnnnnnnnnnnnnnnnnnnnnnnnnnnnnnnnnnnnnnnnnnnnnnnnnnnnnnnnnnnnnnnnnnnnnnnnnnnnnnnnnnnnnnnnnnnnnnnnnnnnnnnnnnnnnnnnnnnnnnnnnnnnnnnnnnnnnnnnnnnnnnnnnnnnnnnnnnnnnnnnnnnnnnnnnnnnnnnnnnnnnnnnnnnnnnnnnnnnnnnnnnnnnnnnnnnnnnnnnnnnnnnnnnnnnnnnnnnnnnnnnnnnnnnnnnnnnnnnnnnnnnnnnnnnnnnnnnnnnnnnnnnnnnnnnnnnnnnnnnnnnnnnnnnnnnnnnnnnnnnnnnnnnnnnnnnnnnnnnnnnnnnnnnnnnnnnnnnnnnnnnnnnnnnnnnnnnnnnnnnnnnnnnnnnnnnnnnnnnnnnnnnnnnnnnnnnnnnnnnnnnnnnnnnnnnnnnnnnnnnnnnnnnnnnnnnnnnnnnnnnnnnnnnnnnnnnnnnnnnnnnnnnnnnnnnnnnnnnnnnnnnnnnnnnnnnnnnnnnnnnnnnnnnnnnnnnnnnnnnnnnnnnnnnnnnnnnnnnnnnnnnnnnnnnnnnnnnnnnnnnnnnnnnnnnnnnnnnnnnnnnnnnnnnnnnnnnnnnnnnnnnnnnnnnnnnnnnnnnnnnnnnnnnnnnnnnnnnnnnnnnnnnnnnnnnnnnnnnnnnnnnnnnnnnnnnnnnnnnnnnnnnnnnnnnnnnnnnnnnnnnnnnnnnnnnnnnnnnnnnnnnnnnnnnnnnnnnnnnnnnnnnnnnnnnnnnnnnnnnnnnnnnnnnnnnnnnnnnnnnnnnnnnnnnnnnnnnnnnnnnnnnnnnnnnnnnnnnnnnnnnnnnnnnnnnnnnnnnnnnnnnnnnnnnnnnnnnnnnnnnnnnnnnnnnnnnnnnnnnnnnnnnnnnnnnnnnnnnnnnnnnnnnnnnnnnnnnnnnnnnnnnnnnnnnnnnnnnnnnnnnnnnnnnnnnnnnnnnnnnnnnnnnnnnnnnnnnnnnnnnnnnnnnnnnnnnnnnnnnnnnnnnnnnnnnnnnnnnnnnnnnnnnnnnnnnnnnnnnnnnnnnnnnnnnnnnnnnnnnnnnnnnnnnnnnnnnnnnnnnnnnnnnnnnnnnnnnnnnnnnnnnnnnnnnnnnnnnnnnnnnnnnnnnnnnnnnnnnnnnnnnnnnnnnnnnnnnnnnnnnnnnnnnnnnnnnnnnnnnnnnnnnnnnnnnnnnnnnnnnnnnnnnnnnnnnnnnnnnnnnnnnnnnnnnnnnnnnnnnnnnnnnnnnnnnnnnnnnnnnnnnnnnnnnnnnnnnnnnnnnnnnnnnnnnnnnnnnnnnnnnnnnnnnnnnnnnnnnnnnnnnnnnnnnnnnnnnnnnnnnnnnnnnnnnnnnnnnnnnnnnnnnnnnnnnnnnnnnnnnnnnnnnnnnnnnnnnnnnnnnnnnnnnnnnnnnnnnnnnnnnnnnnnnnnnnnnnnnnnnnnnnnnnnnnnnnnnnnnnnnnnnnnnnnnnnnnnnnnnnnnnnnnnnnnnnnnnnnnnnnnnnnnnnnnnnnnnnnnnnnnnnnnnnnnnnnnnnnnnnnnnnnnnnnnnnnnnnnnnnnnnnnnnnnnnnnnnnnnnnnnnnnnnnnnnnnnnnnnnnnnnnnnnnnnnnnnnnnnnnnnnnnnnnnnnnnnnnnnnnnnnnnnnnnnnnnnnnnnnnnnnnnnnnnnnnnnnnnnnnnnnnnnnnnnnnnnnnnnnnnnnnnnnnnnnnnnnnnnnnnnnnnnnnnnnnnnnnnnnnnnnnnnnnnnnnnnnnnnnnnnnnnnnnnnnnnnnnnnnnnnnnnnnnnnnnnnnnnnnnnnnnnnnnnnnnnnnnnnnnnnnnnnnnnnnnnnnnnnnnnnnnnnnnnnnnnnnnnnnnnnnnnnnnnnnnnnnnnnnnnnnnnnnnnnnnnnnnnnnnnnnnnnnnnnnnnnnnnnnnnnnnnnnnnnnnnnnnnnnnnnnnnnnnnnnnnnnnnnnnnnnnnnnnnnnnnnnnnnnnnnnnnnnnnnnnnnnnnnnnnnnnnnnnnnnnnnnnnnnnnnnnnnnnnnnnnnnnnnnnnnnnnnnnnnnnnnnnnnnnnnnnnnnnnnnnnnnnnnnnnnnnnnnnnnnnnnnnnnnnnnnnnnnnnnnnnnnnnnnnnnnnnnnnnnnnnnnnnnnnnnnnnnnnnnnnnnnnnnnnnnnnnnnnnnnnnnnnnnnnnnnnnnnnnnnnnnnnnnnnnnnnnnnnnnnnnnnnnnnnnnnnnnnnnnnnnnnnnnnnnnnnnnnnnnnnnnnnnnnnnnnnnnnnnnnnnnnnnnnnnnnnnnnnnnnnnnnnnnnnnnnnnnnnnnnnnnnnnnnnnnnnnnnnnnnnnnnnnnnnnnnnnnnnnnnnnnnnnnnnnnnnnnnnnnnnnnnnnnnnnnnnnnnnnnnnnnnnnnnnnnnnnnnnnnnnnnnnnnnnnnnnnnnnnnnnnnnnnnnnnnnnnnnnnnnnnnnnnnnnnnnnnnnnnnnnnnnnnnnnnnnnnnnnnnnnnnnnnnnnnnnnnnnnnnnnnnnnnnnnnnnnnnnnnnnnnnnnnnnnnnnnnnnnnnnnnnnnnnnnnnnnnnnnnnnnnnnnnnnnnnnnnnnnnnnnnnnnnnnnnnnnnnnnnnnnnnnnnnnnnnnnnnnnnnnnnnnnnnnnnnnnnnnnnnnnnnnnnnnnnnnnnnnnnnnnnnnnnnnnnnnnnnnnnnnnnnnnnnnnnnnnnnnnnnnnnnnnnnnnnnnnnnnnnnnnnnnnnnnnnnnnnnnnnnnnnnnnnnnnnnnnnnnnnnnnnnnnnnnnnnnnnnnnnnnnnnnnnnnnnnnnnnnnnnnnnnnnnnnnnnnnnnnnnnnnnnnnnnnnnnnnnnnnnnnnnnnnnnnnnnnnnnnnnnnnnnnnnnnnnnnnnnnnnnnnnnnnnnnnnnnnnnnnnnnnnnnnnnnnnnnnnnnnnnnnnnnnnnnnnnnnnnnnnnnnnnnnnnnnnnnnnnnnnnnnnnnnnnnnnnnnnnnnnnnnnnnnnnnnnnnnnnnnnnnnnnnnnnnnnnnnnnnnnnnnnnnnnnnnnnnnnnnnnnnnnnnnnnnnnnnnnnnnnnnnnnnnnnnnnnnnnnnnnnnnnnnnnnnnnnnnnnnnnnnnnnnnnnnnnnnnnnnnnnnnnnnnnnnnnnnnnnnnnnnnnnnnnnnnnnnnnnnnnnnnnnnnnnnnnnnnnnnnnnnnnnnnnnnnnnnnnnnnnnnnnnnnnnnnnnnnnnnnnnnnnnnnnnnnnnnnnnnnnnnnnnnnnnnnnnnnnnnnnnnnnnnnnnnnnnnnnnnnnnnnnnnnnnnnnnnnnnnnnnnnnnnnnnnnnnnnnnnnnnnnnnnnnnnnnnnnnnnnnnnnnnnnnnnnnnnnnnnnnnnnnnnnnnnnnnnnnnnnnnnnnnnnnnnnnnnnnnnnnnnnnnnnnnnnnnnnnnnnnnnnnnnnnnnnnnnnnnnnnnnnnnnnnnnnnnnnnnnnnnnnnnnnnnnnnnnnnnnnnnnnnnnnnnnnnnnnnnnnnnnnnnnnnnnnnnnnnnnnnnnnnnnnnnnnnnnnnnnnnnnnnnnnnnnnnnnnnnnnnnnnnnnnnnnnnnnnnnnnnnnnnnnnnnnnnnnnnnnnnnnnnnnnnnnnnnnnnnnnnnnnnnnnnnnnnnnnnnnnnnnnnnnnnnnnnnnnnnnnnnnnnnnnnnnnnnnnnnnnnnnnnnnnnnnnnnnnnnnnnnnnnnnnnnnnnnnnnnnnnnnnnnnnnnnnnnnnnnnnnnnnnnnnnnnnnnnnnnnnnnnnnnnnnnnnnnnnnnnnnnnnnnnnnnnnnnnnnnnnnnnnnnnnnnnnnnnnnnnnnnnnnnnnnnnnnnnnnnnnnnnnnnnnnnnnnnnnnnnnnnnnnnnnnnnnnnnnnnnnnnnnnnnnnnnnnnnnnnnnnnnnnnnnnnnnnnnnnnnnnnnnnnnnnnnnnnnnnnnnnnnnnnnnnnnnnnnnnnnnnnnnnnnnnnnnnnnnnnnnnnnnnnnnnnnnnnnnnnnnnnnnnnnnnnnnnnnnnnnnnnnnnnnnnnnnnnnnnnnnnnnnnnnnnnnnnnnnnnnnnnnnnnnnnnnnnnnnnnnnnnnnnnnnnnnnnnnnnnnnnnnnnnnnnnnnnnnnnnnnnnnnnnnnnnnnnnnnnnnnnnnnnnnnnnnnnnnnnnnnnnnnnnnnnnnnnnnnnnnnnnnnnnnnnnnnnnnnnnnnnnnnnnnnnnnnnnnnnnnnnnnnnnnnnnnnnnnnnnnnnnnnnnnnnnnnnnnnnnnnnnnnnnnnnnnnnnnnnnnnnnnnnnnnnnnnnnnnnnnnnnnnnnnnnnnnnnnnnnnnnnnnnnnnnnnnnnnnnnnnnnnnnnnnnnnnnnnnnnnnnnnnnnnnnnnnnnnnnnnnnnnnnnnnnnnnnnnnnnnnnnnnnnnnnnnnnnnnnnnnnnnnnnnnnnnnnnnnnnnnnnnnnnnnnnnnnnnnnnnnnnnnnnnnnnnnnnnnnnnnnnnnnnnnnnnnnnnnnnnnnnnnnnnnnnnnnnnnnnnnnnnnnnnnnnnnnnnnnnnnnnnnnnnnnnnnnnnnnnnnnnnnnnnnnnnnnnnnnnnnnnnnnnnnnnnnnnnnnnnnnnnnnnnnnnnnnnnnnnnnnnnnnnnnnnnnnnnnnnnnnnnnnnnnnnnnnnnnnnnnnnnnnnnnnnnnnnnnnnnnnnnnnnnnnnnnnnnnnnnnnnnnnnnnnnnnnnnnnnnnnnnnnnnnnnnnnnnnnnnnnnnnnnnnnnnnnnnnnnnnnnnnnnnnnnnnnnnnnnnnnnnnnnnnnnnnnnnnnnnnnnnnnnnnnnnnnnnnnnnnnnnnnnnnnnnnnnnnnnnnnnnnnnnnnnnnnnnnnnnnnnnnnnnnnnnnnnnnnnnnnnnnnnnnnnnnnnnnnnnnnnnnnnnnnnnnnnnnnnnnnnnnnnnnnnnnnnnnnnnnnnnnnnnnnnnnnnnnnnnnnnnnnnnnnnnnnnnnnnnnnnnnnnnnnnnnnnnnnnnnnnnnnnnnnnnnnnnnnnnnnnnnnnnnnnnnnnnnnnnnnnnnnnnnnnnnnnnnnnnnnnnnnnnnnnnnnnnnnnnnnnnnnnnnnnnnnnnnnnnnnnnnnnnnnnnnnnnnnnnnnnnnnnnnnnnnnnnnnnnnnnnnnnnnnnnnnnnnnnnnnnnnnnnnnnnnnnnnnnnnnnnnnnnnnnnnnnnnnnnnnnnnnnnnnnnnnnnnnnnnnnnnnnnnnnnnnnnnnnnnnnnnnnnnnnnnnnnnnnnnnnnnnnnnnnnnnnnnnnnnnnnnnnnnnnnnnnnnnnnnnnnnnnnnnnnnnnnnnnnnnnnnnnnnnnnnnnnnnnnnnnnnnnnnnnnnnnnnnnnnnnnnnnnnnnnnnnnnnnnnnnnnnnnnnnnnnnnnnnnnnnnnnnnnnnnnnnnnnnnnnnnnnnnnnnnnnnnnnnnnnnnnnnnnnnnnnnnnnnnnnnnnnnnnnnnnnnnnnnnnnnnnnnnnnnnnnnnnnnnnnnnnnnnnnnnnnnnnnnnnnnnnnnnnnnnnnnnnnnnnnnnnnnnnnnnnnnnnnnnnnnnnnnnnnnnnnnnnnnnnnnnnnnnnnnnnnnnnnnnnnnnnnnnnnnnnnnnnnnnnnnnnnnnnnnnnnnnnnnnnnnnnnnnnnnnnnnnnnnnnnnnnnnnnnnnnnnnnnnnnnnnnnnnnnnnnnnnnnnnnnnnnnnnnnnnnnnnnnnnnnnnnnnnnnnnnnnnnnnnnnnnnnnnnnnnnnnnnnnnnnnnnnnnnnnnnnnnnnnnnnnnnnnnnnnnnnnnnnnnnnnnnnnnnnnnnnnnnnnnnnnnnnnnnnnnnnnnnnnnnnnnnnnnnnnnnnnnnnnnnnnnnnnnnnnnnnnnnnnnnnnnnnnnnnnnnnnnnnnnnnnnnnnnnnnnnnnnnnnnnnnnnnnnnnnnnnnnnnnnnnnnnnnnnnnnnnnnnnnnnnnnnnnnnnnnnnnnnnnnnnnnnnnnnnnnnnnnnnnnnnnnnnnnnnnnnnnnnnnnnnnnnnnnnnnnnnnnnnnnnnnnnnnnnnnnnnnnnnnnnnnnnnnnnnnnnnnnnnnnnnnnnnnnnnnnnnnnnnnnnnnnnnnnnnnnnnnnnnnnnnnnnnnnnnnnnnnnnnnnnnnnnnnnnnnnnnnnnnnnnnnnnnnnnnnnnnnnnnnnnnnnnnnnnnnnnnnnnnnnnnnnnnnnnnnnnnnnnnnnnnnnnnnnnnnnnnnnnnnnnnnnnnnnnnnnnnnnnnnnnnnnnnnnnnnnnnnnnnnnnnnnnnnnnnnnnnnnnnnnnnnnnnnnnnnnnnnnnnnnnnnnnnnnnnnnnnnnnnnnnnnnnnnnnnnnnnnnnnnnnnnnnnnnnnnnnnnnnnnnnnnnnnnnnnnnnnnnnnnnnnnnnnnnnnnnnnnnnnnnnnnnnnnnnnnnnnnnnnnnnnnnnnnnnnnnnnnnnnnnnnnnnnnnnnnnnnnnnnnnnnnnnnnnnnnnnnnnnnnnnnnnnnnnnnnnnnnnnnnnnnnnnnnnnnnnnnnnnnnnnnnnnnnnnnnnnnnnnnnnnnnnnnnnnnnnnnnnnnnnnnnnnnnnnnnnnnnnnnnnnnnnnnnnnnnnnnnnnnnnnnnnnnnnnnnnnnnnnnnnnnnnnnnnnnnnnnnnnnnnnnnnnnnnnnnnnnnnnnnnnnnnnnnnnnnnnnnnnnnnnnnnnnnnnnnnnnnnnnnnnnnnnnnnnnnnnnnnnnnnnnnnnnnnnnnnnnnnnnnnnnnnnnnnnnnnnnnnnnnnnnnnnnnnnnnnnnnnnnnnnnnnnnnnnnnnnnnnnnnnnnnnnnnnnnnnnnnnnnnnnnnnnnnnnnnnnnnnnnnnnnnnnnnnnnnnnnnnnnnnnnnnnnnnnnnnnnnnnnnnnnnnnnnnnnnnnnnnnnnnnnnnnnnnnnnnnnnnnnnnnnnnnnnnnnnnnnnnnnnnnnnnnnnnnnnnnnnnnnnnnnnnnnnnnnnnnnnnnnnnnnnnnnnnnnnnnnnnnnnnnnnnnnnnnnnnnnnnnnnnnnnnnnnnnnnnnnnnnnnnnnnnnnnnnnnnnnnnnnnnnnnnnnnnnnnnnnnnnnnnnnnnnnnnnnnnnnnnnnnnnnnnnnnnnnnnnnnnnnnnnnnnnnnnnnnnnnnnnnnnnnnnnnnnnnnnnnnnnnnnnnnnnnnnnnnnnnnnnnnnnnnnnnnnnnnnnnnnnnnnnnnnnnnnnnnnnnnnnnnnnnnnnnnnnnnnnnnnnnnnnnnnnnnnnnnnnnnnnnnnnnnnnnnnnnnnnnnnnnnnnnnnnnnnnnnnnnnnnnnnnnnnnnnnnnnnnnnnnnnnnnnnnnnnnnnnnnnnnnnnnnnnnnnnnnnnnnnnnnnnnnnnnnnnnnnnnnnnnnnnnnnnnnnnnnnnnnnnnnnnnnnnnnnnnnnnnnnnnnnnnnnnnnnnnnnnnnnnnnnnnnnnnnnnnnnnnnnnnnnnnnnnnnnnnnnnnnnnnnnnnnnnnnnnnnnnnnnnnnnnnnnnnnnnnnnnnnnnnnnnnnnnnnnnnnnnnnnnnnnnnnnnnnnnnnnnnnnnnnnnnnnnnnnnnnnnnnnnnnnnnnnnnnnnnnnnnnnnnnnnnnnnnnnnnnnnnnnnnnnnnnnnnnnnnnnnnnnnnnnnnnnnnnnnnnnnnnnnnnnnnnnnnnnnnnnnnnnnnnnnnnnnnnnnnnnnnnnnnnnnnnnnnnnnnnnnnnnnnnnnnnnnnnnnnnnnnnnnnnnnnnnnnnnnnnnnnnnnnnnnnnnnnnnnnnnnnnnnnnnnnnnnnnnnnnnnnnnnnnnnnnnnnnnnnnnnnnnnnnnnnnnnnnnnnnnnnnnnnnnnnnnnnnnnnnnnnnnnnnnnnnnnnnnnnnnnnnnnnnnnnnnnnnnnnnnnnnnnnnnnnnnnnnnnnnnnnnnnnnnnnnnnnnnnnnnnnnnnnnnnnnnnnnnnnnnnnnnnnnnnnnnnnnnnnnnnnnnnnnnnnnnnnnnnnnnnnnnnnnnnnnnnnnnnnnnnnnnnnnnnnnnnnnnnnnnnnnnnnnnnnnnnnnnnnnnnnnnnnnnnnnnnnnnnnnnnnnnnnnnnnnnnnnnnnnnnnnnnnnnnnnnnnnnnnnnnnnnnnnnnnnnnnnnnnnnnnnnnnnnnnnnnnnnnnnnnnnnnnnnnnnnnnnnnnnnnnnnnnnnnnnnnnnnnnnnnnnnnnnnnnnnnnnnnnnnnnnnnnnnnnnnnnnnnnnnnnnnnnnnnnnnnnnnnnnnnnnnnnnnnnnnnnnnnnnnnnnnnnnnnnnnnnnnnnnnnnnnnnnnnnnnnnnnnnnnnnnnnnnnnnnnnnnnnnnnnnnnnnnnnnnnnnnnnnnnnnnnnnnnnnnnnnnnnnnnnnnnnnnnnnnnnnnnnnnnnnnnnnnnnnnnnnnnnnnnnnnnnnnnnnnnnnnnnnnnnnnnnnnnnnnnnnnnnnnnnnnnnnnnnnnnnnnnnnnnnnnnnnnnnnnnnnnnnnnnnnnnnnnnnnnnnnnnnnnnnnnnnnnnnnnnnnnnnnnnnnnnnnnnnnnnnnnnnnnnnnnnnnnnnnnnnnnnnnnnnnnnnnnnnnnnnnnnnnnnnnnnnnnnnnnnnnnnnnnnnnnnnnnnnnnnnnnnnnnnnnnnnnnnnnnnnnnnnnnnnnnnnnnnnnnnnnnnnnnnnnnnnnnnnnnnnnnnnnnnnnnnnnnnnnnnnnnnnnnnnnnnnnnnnnnnnnnnnnnnnnnnnnnnnnnnnnnnnnnnnnnnnnnnnnnnnnnnnnnnnnnnnnnnnnnnnnnnnnnnnnnnnnnnnnnnnnnnnnnnnnnnnnnnnnnnnnnnnnnnnnnnnnnnnnnnnnnnnnnnnnnnnnnnnnnnnnnnnnnnnnnnnnnnnnnnnnnnnnnnnnnnnnnnnnnnnnnnnnnnnnnnnnnnnnnnnnnnnnnnnnnnnnnnnnnnnnnnnnnnnnnnnnnnnnnnnnnnnnnnnnnnnnnnnnnnnnnnnnnnnnnnnnnnnnnnnnnnnnnnnnnnnnnnnnnnnnnnnnnnnnnnnnnnnnnnnnnnnnnnnnnnnnnnnnnnnnnnnnnnnnnnnnnnnnnnnnnnnnnnnnnnnnnnnnnnnnnnnnnnnnnnnnnnnnnnnnnnnnnnnnnnnnnnnnnnnnnnnnnnnnnnnnnnnnnnnnnnnnnnnnnnnnnnnnnnnnnnnnnnnnnnnnnnnnnnnnnnnnnnnnnnnnnnnnnnnnnnnnnnnnnnnnnnnnnnnnnnnnnnnnnnnnnnnnnnnnnnnnnnnnnnnnnnnnnnnnnnnnnnnnnnnnnnnnnnnnnnnnnnnnnnnnnnnnnnnnnnnnnnnnnnnnnnnnnnnnnnnnnnnnnnnnnnnnnnnnnnnnnnnnnnnnnnnnnnnnnnnnnnnnnnnnnnnnnnnnnnnnnnnnnnnnnnnnnnnnnnnnnnnnnnnnnnnnnnnnnnnnnnnnnnnnnnnnnnnnnnnnnnnnnnnnnnnnnnnnnnnnnnnnnnnnnnnnnnnnnnnnnnnnnnnnnnnnnnnnnnnnnnnnnnnnnnnnnnnnnnnnnnnnnnnnnnnnnnnnnnnnnnnnnnnnnnnnnnnnnnnnnnnnnnnnnnnnnnnnnnnnnnnnnnnnnnnnnnnnnnnnnnnnnnnnnnnnnnnnnnnnnnnnnnnnnnnnnnnnnnnnnnnnnnnnnnnnnnnnnnnnnnnnnnnnnnnnnnnnnnnnnnnnnnnnnnnnnnnnnnnnnnnnnnnnnnnnnnnnnnnnnnnnnnnnnnnnnnnnnnnnnnnnnnnnnnnnnnnnnnnnnnnnnnnnnnnnnnnnnnnnnnnnnnnnnnnnnnnnnnnnnnnnnnnnnnnnnnnnnnnnnnnnnnnnnnnnnnnnnnnnnnnnnnnnnnnnnnnnnnnnnnnnnnnnnnnnnnnnnnnnnnnnnnnnnnnnnnnnnnnnnnnnnnnnnnnnnnnnnnnnnnnnnnnnnnnnnnnnnnnnnnnnnnnnnnnnnnnnnnnnnnnnnnnnnnnnnnnnnnnnnnnnnnnnnnnnnnnnnnnnnnnnnnnnnnnnnnnnnnnnnnnnnnnnnnnnnnnnnnnnnnnnnnnnnnnnnnnnnnnnnnnnnnnnnnnnnnnnnnnnnnnnnnnnnnnnnnnnnnnnnnnnnnnnnnnnnnnnnnnnnnnnnnnnnnnnnnnnnnnnnnnnnnnnnnnnnnnnnnnnnnnnnnnnnnnnnnnnnnnnnnnnnnnnnnnnnnnnnnnnnnnnnnnnnnnnnnnnnnnnnnnnnnnnnnnnnnnnnnnnnnnnnnnnnnnnnnnnnnnnnnnnnnnnnnnnnnnnnnnnnnnnnnnnnnnnnnnnnnnnnnnnnnnnnnnnnnnnnnnnnnnnnnnnnnnnnnnnnnnnnnnnnnnnnnnnnnnnnnnnnnnnnnnnnnnnnnnnnnnnnnnnnnnnnnnnnnnnnnnnnnnnnnnnnnnnnnnnnnnnnnnnnnnnnnnnnnnnnnnnnnnnnnnnnnnnnnnnnnnnnnnnnnnnnnnnnnnnnnnnnnnnnnnnnnnnnnnnnnnnnnnnnnnnnnnnnnnnnnnnnnnnnnnnnnnnnnnnnnnnnnnnnnnnnnnnnnnnnnnnnnnnnnnnnnnnnnnnnnnnnnnnnnnnnnnnnnnnnnnnnnnnnnnnnnnnnnnnnnnnnnnnnnnnnnnnnnnnnnnnnnnnnnnnnnnnnnnnnnnnnnnnnnnnnnnnnnnnnnnnnnnnnnnnnnnnnnnnnnnnnnnnnnnnnnnnnnnnnnnnnnnnnnnnnnnnnnnnnnnnnnnnnnnnnnnnnnnnnnnnnnnnnnnnnnnnnnnnnnnnnnnnnnnnnnnnnnnnnnnnnnnnnnnnnnnnnnnnnnnnnnnnnnnnnnnnnnnnnnnnnnnnnnnnnnnnnnnnnnnnnnnnnnnnnnnnnnnnnnnnnnnnnnnnnnnnnnnnnnnnnnnnnnnnnnnnnnnnnnnnnnnnnnnnnnnnnnnnnnnnnnnnnnnnnnnnnnnnnnnnnnnnnnnnnnnnnnnnnnnnnnnnnnnnnnnnnnnnnnnnnnnnnnnnnnnnnnnnnnnnnnnnnnnnnnnnnnnnnnnnnnnnnnnnnnnnnnnnnnnnnnnnnnnnnnnnnnnnnnnnnnnnnnnnnnnnnnnnnnnnnnnnnnnnnnnnnnnnnnnnnnnnnnnnnnnnnnnnnnnnnnnnnnnnnnnnnnnnnnnnnnnnnnnnnnnnnnnnnnnnnnnnnnnnnnnnnnnnnnnnnnnnnnnnnnnnnnnnnnnnnnnnnnnnnnnnnnnnnnnnnnnnnnnnnnnnnnnnnnnnnnnnnnnnnnnnnnnnnnnnnnnnnnnnnnnnnnnnnnnnnnnnnnnnnnnnnnnnnnnnnnnnnnnnnnnnnnnnnnnnnnnnnnnnnnnnnnnnnnnnnnnnnnnnnnnnnnnnnnnnnnnnnnnnnnnnnnnnnnnnnnnnnnnnnnnnnnnnnnnnnnnnnnnnnnnnnnnnnnnnnnnnnnnnnnnnnnnnnnnnnnnnnnnnnnnnnnnnnnnnnnnnnnnnnnnnnnnnnnnnnnnnnnnnnnnnnnnnnnnnnnnnnnnnnnnnnnnnnnnnnnnnnnnnnnnnnnnnnnnnnnnnnnnnnnnnnnnnnnnnnnnnnnnnnnnnnnnnnnnnnnnnnnnnnnnnnnnnnnnnnnnnnnnnnnnnnnnnnnnnnnnnnnnnnnnnnnnnnnnnnnnnnnnnnnnnnnnnnnnnnnnnnnnnnnnnnnnnnnnnnnnnnnnnnnnnnnnnnnnnnnnnnnnnnnnnnnnnnnnnnnnnnnnnnnnnnnnnnnnnnnnnnnnnnnnnnnnnnnnnnnnnnnnnnnnnnnnnnnnnnnnnnnnnnnnnnnnnnnnnnnnnnnnnnnnnnnnnnnnnnnnnnnnnnnnnnnnnnnnnnnnnnnnnnnnnnnnnnnnnnnnnnnnnnnnnnnnnnnnnnnnnnnnnnnnnnnnnnnnnnnnnnnnnnnnnnnnnnnnnnnnnnnnnnnnnnnnnnnnnnnnnnnnnnnnnnnnnnnnnnnnnnnnnnnnnnnnnnnnnnnnnnnnnnnnnnnnnnnnnnnnnnnnnnnnnnnnnnnnnnnnnnnnnnnnnnnnnnnnnnnnnnnnnnnnnnnnnnnnnnnnnnnnnnnnnnnnnnnnnnnnnnnnnnnnnnnnnnnnnnnnnnnnnnnnnnnnnnnnnnnnnnnnnnnnnnnnnnnnnnnnnnnnnnnnnnnnnnnnnnnnnnnnnnnnnnnnnnnnnnnnnnnnnnnnnnnnnnnnnnnnnnnnnnnnnnnnnnnnnnnnnnnnnnnnnnnnnnnnnnnnnnnnnnnnnnnnnnnnnnnnnnnnnnnnnnnnnnnnnnnnnnnnnnnnnnnnnnnnnnnnnnnnnnnnnnnnnnnnnnnnnnnnnnnnnnnnnnnnnnnnnnnnnnnnnnnnnnnnnnnnnnnnnnnnnnnnnnnnnnnnnnnnnnnnnnnnnnnnnnnnnnnnnnnnnnnnnnnnnnnnnnnnnnnnnnnnnnnnnnnnnnnnnnnnnnnnnnnnnnnnnnnnnnnnnnnnnnnnnnnnnnnnnnnnnnnnnnnnnnnnnnnnnnnnnnnnnnnnnnnnnnnnnnnnnnnnnnnnnnnnnnnnnnnnnnnnnnnnnnnnnnnnnnnnnnnnnnnnnnnnnnnnnnnnnnnnnnnnnnnnnnnnnnnnnnnnnnnnnnnnnnnnnnnnnnnnnnnnnnnnnnnnnnnnnnnnnnnnnnnnnnnnnnnnnnnnnnnnnnnnnnnnnnnnnnnnnnnnnnnnnnnnnnnnnnnnnnnnnnnnnnnnnnnnnnnnnnnnnnnnnnnnnnnnnnnnnnnnnnnnnnnnnnnnnnnnnnnnnnnnnnnnnnnnnnnnnnnnnnnnnnnnnnnnnnnnnnnnnnnnnnnnnnnnnnnnnnnnnnnnnnnnnnnnnnnnnnnnnnnnnnnnnnnnnnnnnnnnnnnnnnnnnnnnnnnnnnnnnnnnnnnnnnnnnnnnnnnnnnnnnnnnnnnnnnnnnnnnnnnnnnnnnnnnnnnnnnnnnnnnnnnnnnnnnnnnnnnnnnnnnnnnnnnnnnnnnnnnnnnnnnnnnnnnnnnnnnnnnnnnnnnnnnnnnnnnnnnnnnnnnnnnnnnnnnnnnnnnnnnnnnnnnnnnnnnnnnnnnnnnnnnnnnnnnnnnnnnnnnnnnnnnnnnnnnnnnnnnnnnnnnnnnnnnnnnnnnnnnnnnnnnnnnnnnnnnnnnnnnnnnnnnnnnnnnnnnnnnnnnnnnnnnnnnnnnnnnnnnnnnnnnnnnnnnnnnnnnnnnnnnnnnnnnnnnnnnnnnnnnnnnnnnnnnnnnnnnnnnnnnnnnnnnnnnnnnnnnnnnnnnnnnnnnnnnnnnnnnnnnnnnnnnnnnnnnnnnnnnnnnnnnnnnnnnnnnnnnnnnnnnnnnnnnnnnnnnnnnnnnnnnnnnnnnnnnnnnnnnnnnnnnnnnnnnnnnnnnnnnnnnnnnnnnnnnnnnnnnnnnnnnnnnnnnnnnnnnnnnnnnnnnnnnnnnnnnnnnnnnnnnnnnnnnnnnnnnnnnnnnnnnnnnnnnnnnnnnnnnnnnnnnnnnnnnnnnnnnnnnnnnnnnnnnnnnnnnnnnnnnnnnnnnnnnnnnnnnnnnnnnnnnnnnnnnnnnnnnnnnnnnnnnnnnnnnnnnnnnnnnnnnnnnnnnnnnnnnnnnnnnnnnnnnnnnnnnnnnnnnnnnnnnnnnnnnnnnnnnnnnnnnnnnnnnnnnnnnnnnnnnnnnnnnnnnnnnnnnnnnnnnnnnnnnnnnnnnnnnnnnnnnnnnnnnnnnnnnnnnnnnnnnnnnnnnnnnnnnnnnnnnnnnnnnnnnnnnnnnnnnnnnnnnnnnnnnnnnnnnnnnnnnnnnnnnnnnnnnnnnnnnnnnnnnnnnnnnnnnnnnnnnnnnnnnnnnnnnnnnnnnnnnnnnnnnnnnnnnnnnnnnnnnnnnnnnnnnnnnnnnnnnnnnnnnnnnnnnnnnnnnnnnnnnnnnnnnnnnnnnnnnnnnnnnnnnnnnnnnnnnnnnnnnnnnnnnnnnnnnnnnnnnnnnnnnnnnnnnnnnnnnnnnnnnnnnnnnnnnnnnnnnnnnnnnnnnnnnnnnnnnnnnnnnnnnnnnnnnnnnnnnnnnnnnnnnnnnnnnnnnnnnnnnnnnnnnnnnnnnnnnnnnnnnnnnnnnnnnnnnnnnnnnnnnnnnnnnnnnnnnnnnnnnnnnnnnnnnnnnnnnnnnnnnnnnnnnnnnnnnnnnnnnnnnnnnnnnnnnnnnnnnnnnnnnnnnnnnnnnnnnnnnnnnnnnnnnnnnnnnnnnnnnnnnnnnnnnnnnnnnnnnnnnnnnnnnnnnnnnnnnnnnnnnnnnnnnnnnnnnnnnnnnnnnnnnnnnnnnnnnnnnnnnnnnnnnnnnnnnnnnnnnnnnnnnnnnnnnnnnnnnnnnnnnnnnnnnnnnnnnnnnnnnnnnnnnnnnnnnnnnnnnnnnnnnnnnnnnnnnnnnnnnnnnnnnnnnnnnnnnnnnnnnnnnnnnnnnnnnnnnnnnnnnnnnnnnnnnnnnnnnnnnnnnnnnnnnnnnnnnnnnnnnnnnnnnnnnnnnnnnnnnnnnnnnnnnnnnnnnnnnnnnnnnnnnnnnnnnnnnnnnnnnnnnnnnnnnnnnnnnnnnnnnnnnnnnnnnnnnnnnnnnnnnnnnnnnnnnnnnnnnnnnnnnnnnnnnnnnnnnnnnnnnnnnnnnnnnnnnnnnnnnnnnnnnnnnnnnnnnnnnnnnnnnnnnnnnnnnnnnnnnnnnnnnnnnnnnnnnnnnnnnnnnnnnnnnnnnnnnnnnnnnnnnnnnnnnnnnnnnnnnnnnnnnnnnnnnnnnnnnnnnnnnnnnnnnnnnnnnnnnnnnnnnnnnnnnnnnnnnnnnnnnnnnnnnnnnnnnnnnnnnnnnnnnnnnnnnnnnnnnnnnnnnnnnnnnnnnnnnnnnnnnnnnnnnnnnnnnnnnnnnnnnnnnnnnnnnnnnnnnnnnnnnnnnnnnnnnnnnnnnnnnnnnnnnnnnnnnnnnnnnnnnnnnnnnnnnnnnnnnnnnnnnnnnnnnnnnnnnnnnnnnnnnnnnnnnnnnnnnnnnnnnnnnnnnnnnnnnnnnnnnnnnnnnnnnnnnnnnnnnnnnnnnnnnnnnnnnnnnnnnnnnnnnnnnnnnnnnnnnnnnnnnnnnnnnnnnnnnnnnnnnnnnnnnnnnnnnnnnnnnnnnnnnnnnnnnnnnnnnnnnnnnnnnnnnnnnnnnnnnnnnnnnnnnnnnnnnnnnnnnnnnnnnnnnnnnnnnnnnnnnnnnnnnnnnnnnnnnnnnnnnnnnnnnnnnnnnnnnnnnnnnnnnnnnnnnnnnnnnnnnnnnnnnnnnnnnnnnnnnnnnnnnnnnnnnnnnnnnnnnnnnnnnnnnnnnnnnnnnnnnnnnnnnnnnnnnnnnnnnnnnnnnnnnnnnnnnnnnnnnnnnnnnnnnnnnnnnnnnnnnnnnnnnnnnnnnnnnnnnnnnnnnnnnnnnnnnnnnnnnnnnnnnnnnnnnnnnnnnnnnnnnnnnnnnnnnnnnnnnnnnnnnnnnnnnnnnnnnnnnnnnnnnnnnnnnnnnnnnnnnnnnnnnnnnnnnnnnnnnnnnnnnnnnnnnnnnnnnnnnnnnnnnnnnnnnnnnnnnnnnnnnnnnnnnnnnnnnnnnnnnnnnnnnnnnnnnnnnnnnnnnnnnnnnnnnnnnnnnnnnnnnnnnnnnnnnnnnnnnnnnnnnnnnnnnnnnnnnnnnnnnnnnnnnnnnnnnnnnnnnnnnnnnnnnnnnnnnnnnnnnnnnnnnnnnnnnnnnnnnnnnnnnnnnnnnnnnnnnnnnnnnnnnnnnnnnnnnnnnnnnnnnnnnnnnnnnnnnnnnnnnnnnnnnnnnnnnnnnnnnnnnnnnnnnnnnnnnnnnnnnnnnnnnnnnnnnnnnnnnnnnnnnnnnnnnnnnnnnnnnnnnnnnnnnnnnnnnnnnnnnnnnnnnnnnnnnnnnnnnnnnnnnnnnnnnnnnnnnnnnnnnnnnnnnnnnnnnnnnnnnnnnnnnnnnnnnnnnnnnnnnnnnnnnnnnnnnnnnnnnnnnnnnnnnnnnnnnnnnnnnnnnnnnnnnnnnnnnnnnnnnnnnnnnnnnnnnnnnnnnnnnnnnnnnnnnnnnnnnnnnnnnnnnnnnnnnnnnnnnnnnnnnnnnnnnnnnnnnnnnnnnnnnnnnnnnnnnnnnnnnnnnnnnnnnnnnnnnnnnnnnnnnnnnnnnnnnnnnnnnnnnnnnnnnnnnnnnnnnnnnnnnnnnnnnnnnnnnnnnnnnnnnnnnnnnnnnnnnnnnnnnnnnnnnnnnnnnnnnnnnnnnnnnnnnnnnnnnnnnnnnnnnnnnnnnnnnnnnnnnnnnnnnnnnnnnnnnnnnnnnnnnnnnnnnnnnnnnnnnnnnnnnnnnnnnnnnnnnnnnnnnnnnnnnnnnnnnnnnnnnnnnnnnnnnnnnnnnnnnnnnnnnnnnnnnnnnnnnnnnnnnnnnnnnnnnnnnnnnnnnnnnnnnnnnnnnnnnnnnnnnnnnnnnnnnnnnnnnnnnnnnnnnnnnnnnnnnnnnnnnnnnnnnnnnnnnnnnnnnnnnnnnnnnnnnnnnnnnnnnnnnnnnnnnnnnnnnnnnnnnnnnnnnnnnnnnnnnnnnnnnnnnnnnnnnnnnnnnnnnnnnnnnnnnnnnnnnnnnnnnnnnnnnnnnnnnnnnnnnnnnnnnnnnnnnnnnnnnnnnnnnnnnnnnnnnnnnnnnnnnnnnnnnnnnnnnnnnnnnnnnnnnnnnnnnnnnnnnnnnnnnnnnnnnnnnnnnnnnnnnnnnnnnnnnnnnnnnnnnnnnnnnnnnnnnnnnnnnnnnnnnnnnnnnnnnnnnnnnnnnnnnnnnnnnnnnnnnnnnnnnnnnnnnnnnnnnnnnnnnnnnnnnnnnnnnnnnnnnnnnnnnnnnnnnnnnnnnnnnnnnnnnnnnnnnnnnnnnnnnnnnnnnnnnnnnnnnnnnnnnnnnnnnnnnnnnnnnnnnnnnnnnnnnnnnnnnnnnnnnnnnnnnnnnnnnnnnnnnnnnnnnnnnnnnnnnnnnnnnnnnnnnnnnnnnnnnnnnnnnnnnnnnnnnnnnnnnnnnnnnnnnnnnnnnnnnnnnnnnnnnnnnnnnnnnnnnnnnnnnnnnnnnnnnnnnnnnnnnnnnnnnnnnnnnnnnnnnnnnnnnnnnnnnnnnnnnnnnnnnnnnnnnnnnnnnnnnnnnnnnnnnnnnnnnnnnnnnnnnnnnnnnnnnnnnnnnnnnnnnnnnnnnnnnnnnnnnnnnnnnnnnnnnnnnnnnnnnnnnnnnnnnnnnnnnnnnnnnnnnnnnnnnnnnnnnnnnnnnnnnnnnnnnnnnnnnnnnnnnnnnnnnnnnnnnnnnnnnnnnnnnnnnnnnnnnnnnnnnnnnnnnnnnnnnnnnnnnnnnnnnnnnnnnnnnnnnnnnnnnnnnnnnnnnnnnnnnnnnnnnnnnnnnnnnnnnnnnnnnnnnnnnnnnnnnnnnnnnnnnnnnnnnnnnnnnnnnnnnnnnnnnnnnnnnnnnnnnnnnnnnnnnnnnnnnnnnnnnnnnnnnnnnnnnnnnnnnnnnnnnnnnnnnnnnnnnnnnnnnnnnnnnnnnnnnnnnnnnnnnnnnnnnnnnnnnnnnnnnnnnnnnnnnnnnnnnnnnnnnnnnnnnnnnnnnnnnnnnnnnnnnnnnnnnnnnnnnnnnnnnnnnnnnnnnnnnnnnnnnnnnnnnnnnnnnnnnnnnnnnnnnnnnnnnnnnnnnnnnnnnnnnnnnnnnnnnnnnnnnnnnnnnnnnnnnnnnnnnnnnnnnnnnnnnnnnnnnnnnnnnnnnnnnnnnnnnnnnnnnnnnnnnnnnnnnnnnnnnnnnnnnnnnnnnnnnnnnnnnnnnnnnnnnnnnnnnnnnnnnnnnnnnnnnnnnnnnnnnnnnnnnnnnnnnnnnnnnnnnnnnnnnnnnnnnnnnnnnnnnnnnnnnnnnnnnnnnnnnnnnnnnnnnnnnnnnnnnnnnnnnnnnnnnnnnnnnnnnnnnnnnnnnnnnnnnnnnnnnnnnnnnnnnnnnnnnnnnnnnnnnnnnnnnnnnnnnnnnnnnnnnnnnnnnnnnnnnnnnnnnnnnnnnnnnnnnnnnnnnnnnnnnnnnnnnnnnnnnnnnnnnnnnnnnnnnnnnnnnnnnnnnnnnnnnnnnnnnnnnnnnnnnnnnnnnnnnnnnnnnnnnnnnnnnnnnnnnnnnnnnnnnnnnnnnnnnnnnnnnnnnnnnnnnnnnnnnnnnnnnnnnnnnnnnnnnnnnnnnnnnnnnnnnnnnnnnnnnnnnnnnnnnnnnnnnnnnnnnnnnnnnnnnnnnnnnnnnnnnnnnnnnnnnnnnnnnnnnnnnnnnnnnnnnnnnnnnnnnnnnnnnnnnnnnnnnnnnnnnnnnnnnnnnnnnnnnnnnnnnnnnnnnnnnnnnnnnnnnnnnnnnnnnnnnnnnnnnnnnnnnnnnnnnnnnnnnnnnnnnnnnnnnnnnnnnnnnnnnnnnnnnnnnnnnnnnnnnnnnnnnnnnnnnnnnnnnnnnnnnnnnnnnnnnnnnnnnnnnnnnnnnnnnnnnnnnnnnnnnnnnnnnnnnnnnnnnnnnnnnnnnnnnnnnnnnnnnnnnnnnnnnnnnnnnnnnnnnnnnnnnnnnnnnnnnnnnnnnnnnnnnnnnnnnnnnnnnnnnnnnnnnnnnnnnnnnnnnnnnnnnnnnnnnnnnnnnnnnnnnnnnnnnnnnnnnnnnnnnnnnnnnnnnnnnnnnnnnnnnnnnnnnnnnnnnnnnnnnnnnnnnnnnnnnnnnnnnnnnnnnnnnnnnnnnnnnnnnnnnnnnnnnnnnnnnnnnnnnnnnnnnnnnnnnnnnnnnnnnnnnnnnnnnnnnnnnnnnnnnnnnnnnnnnnnnnnnnnnnnnnnnnnnnnnnnnnnnnnnnnnnnnnnnnnnnnnnnnnnnnnnnnnnnnnnnnnnnnnnnnnnnnnnnnnnnnnnnnnnnnnnnnnnnnnnnnnnnnnnnnnnnnnnnnnnnnnnnnnnnnnnnnnnnnnnnnnnnnnnnnnnnnnnnnnnnnnnnnnnnnnnnnnnnnnnnnnnnnnnnnnnnnnnnnnnnnnnnnnnnnnnnnnnnnnnnnnnnnnnnnnnnnnnnnnnnnnnnnnnnnnnnnnnnnnnnnnnnnnnnnnnnnnnnnnnnnnnnnnnnnnnnnnnnnnnnnnnnnnnnnnnnnnnnnnnnnnnnnnnnnnnnnnnnnnnnnnnnnnnnnnnnnnnnnnnnnnnnnnnnnnnnnnnnnnnnnnnnnnnnnnnnnnnnnnnnnnnnnnnnnnnnnnnnnnnnnnnnnnnnnnnnnnnnnnnnnnnnnnnnnnnnnnnnnnnnnnnnnnnnnnnnnnnnnnnnnnnnnnnnnnnnnnnnnnnnnnnnnnnnnnnnnnnnnnnnnnnnnnnnnnnnnnnnnnnnnnnnnnnnnnnnnnnnnnnnnnnnnnnnnnnnnnnnnnnnnnnnnnnnnnnnnnnnnnnnnnnnnnnnnnnnnnnnnnnnnnnnnnnnnnnnnnnnnnnnnnnnnnnnnnnnnnnnnnnnnnnnnnnnnnnnnnnnnnnnnnnnnnnnnnnnnnnnnnnnnnnnnnnnnnnnnnnnnnnnnnnnnnnnnnnnnnnnnnnnnnnnnnnnnnnnnnnnnnnnnnnnnnnnnnnnnnnnnnnnnnnnnnnnnnnnnnnnnnnnnnnnnnnnnnnnnnnnnnnnnnnnnnnnnnnnnnnnnnnnnnnnnnnnnnnnnnnnnnnnnnnnnnnnnnnnnnnnnnnnnnnnnnnnnnnnnnnnnnnnnnnnnnnnnnnnnnnnnnnnnnnnnnnnnnnnnnnnnnnnnnnnnnnnnnnnnnnnnnnnnnnnnnnnnnnnnnnnnnnnnnnnnnnnnnnnnnnnnnnnnnnnnnnnnnnnnnnnnnnnnnnnnnnnnnnnnnnnnnnnnnnnnnnnnnnnnnnnnnnnnnnnnnnnnnnnnnnnnnnnnnnnnnnnnnnnnnnnnnnnnnnnnnnnnnnnnnnnnnnnnnnnnnnnnnnnnnnnnnnnnnnnnnnnnnnnnnnnnnnnnnnnnnnnnnnnnnnnnnnnnnnnnnnnnnnnnnnnnnnnnnnnnnnnnnnnnnnnnnnnnnnnnnnnnnnnnnnnnnnnnnnnnnnnnnnnnnnnnnnnnnnnnnnnnnnnnnnnnnnnnnnnnnnnnnnnnnnnnnnnnnnnnnnnnnnnnnnnnnnnnnnnnnnnnnnnnnnnnnnnnnnnnnnnnnnnnnnnnnnnnnnnnnnnnnnnnnnnnnnnnnnnnnnnnnnnnnnnnnnnnnnnnnnnnnnnnnnnnnnnnnnnnnnnnnnnnnnnnnnnnnnnnnnnnnnnnnnnnnnnnnnnnnnnnnnnnnnnnnnnnnnnnnnnnnnnnnnnnnnnnnnnnnnnnnnnnnnnnnnnnnnnnnnnnnnnnnnnnnnnnnnnnnnnnnnnnnnnnnnnnnnnnnnnnnnnnnnnnnnnnnnnnnnnnnnnnnnnnnnnnnnnnnnnnnnnnnnnnnnnnnnnnnnnnnnnnnnnnnnnnnnnnnnnnnnnnnnnnnnnnnnnnnnnnnnnnnnnnnnnnnnnnnnnnnnnnnnnnnnnnnnnnnnnnnnnnnnnnnnnnnnnnnnnnnnnnnnnnnnnnnnnnnnnnnnnnnnnnnnnnnnnnnnnnnnnnnnnnnnnnnnnnnnnnnnnnnnnnnnnnnnnnnnnnnnnnnnnnnnnnnnnnnnnnnnnnnnnnnnnnnnnnnnnnnnnnnnnnnnnnnnnnnnnnnnnnnnnnnnnnnnnnnnnnnnnnnnnnnnnnnnnnnnnnnnnnnnnnnnnnnnnnnnnnnnnnnnnnnnnnnnnnnnnnnnnnnnnnnnnnnnnnnnnnnnnnnnnnnnnnnnnnnnnnnnnnnnnnnnnnnnnnnnnnnnnnnnnnnnnnnnnnnnnnnnnnnnnnnnnnnnnnnnnnnnnnnnnnnnnnnnnnnnnnnnnnnnnnnnnnnnnnnnnnnnnnnnnnnnnnnnnnnnnnnnnnnnnnnnnnnnnnnnnnnnnnnnnnnnnnnnnnnnnnnnnnnnnnnnnnnnnnnnnnnnnnnnnnnnnnnnnnnnnnnnnnnnnnnnnnnnnnnnnnnnnnnnnnnnnnnnnnnnnnnnnnnnnnnnnnnnnnnnnnnnnnnnnnnnnnnnnnnnnnnnnnnnnnnnnnnnnnnnnnnnnnnnnnnnnnnnnnnnnnnnnnnnnnnnnnnnnnnnnnnnnnnnnnnnnnnnnnnnnnnnnnnnnnnnnnnnnnnnnnnnnnnnnnnnnnnnnnnnnnnnnnnnnnnnnnnnnnnnnnnnnnnnnnnnnnnnnnnnnnnnnnnnnnnnnnnnnnnnnnnnnnnnnnnnnnnnnnnnnnnnnnnnnnnnnnnnnnnnnnnnnnnnnnnnnnnnnnnnnnnnnnnnnnnnnnnnnnnnnnnnnnnnnnnnnnnnnnnnnnnnnnnnnnnnnnnnnnnnnnnnnnnnnnnnnnnnnnnnnnnnnnnnnnnnnnnnnnnnnnnnnnnnnnnnnnnnnnnnnnnnnnnnnnnnnnnnnnnnnnnnnnnnnnnnnnnnnnnnnnnnnnnnnnnnnnnnnnnnnnnnnnnnnnnnnnnnnnnnnnnnnnnnnnnnnnnnnnnnnnnnnnnnnnnnnnnnnnnnnnnnnnnnnnnnnnnnnnnnnnnnnnnnnnnnnnnnnnnnnnnnnnnnnnnnnnnnnnnnnnnnnnnnnnnnnnnnnnnnnnnnnnnnnnnnnnnnnnnnnnnnnnnnnnnnnnnnnnnnnnnnnnnnnnnnnnnnnnnnnnnnnnnnnnnnnnnnnnnnnnnnnnnnnnnnnnnnnnnnnnnnnnnnnnnnnnnnnnnnnnnnnnnnnnnnnnnnnnnnnnnnnnnnnnnnnnnnnnnnnnnnnnnnnnnnnnnnnnnnnnnnnnnnnnnnnnnnnnnnnnnnnnnnnnnnnnnnnnnnnnnnnnnnnnnnnnnnnnnnnnnnnnnnnnnnnnnnnnnnnnnnnnnnnnnnnnnnnnnnnnnnnnnnnnnnnnnnnnnnnnnnnnnnnnnnnnnnnnnnnnnnnnnnnnnnnnnnnnnnnnnnnnnnnnnnnnnnnnnnnnnnnnnnnnnnnnnnnnnnnnnnnnnnnnnnnnnnnnnnnnnnnnnnnnnnnnnnnnnnnnnnnnnnnnnnnnnnnnnnnnnnnnnnnnnnnnnnnnnnnnnnnnnnnnnnnnnnnnnnnnnnnnnnnnnnnnnnnnnnnnnnnnnnnnnnnnnnnnnnnnnnnnnnnnnnnnnnnnnnnnnnnnnnnnnnnnnnnnnnnnnnnnnnnnnnnnnnnnnnnnnnnnnnnnnnnnnnnnnnnnnnnnnnnnnnnnnnnnnnnnnnnnnnnnnnnnnnnnnnnnnnnnnnnnnnnnnnnnnnnnnnnnnnnnnnnnnnnnnnnnnnnnnnnnnnnnnnnnnnnnnnnnnnnnnnnnnnnnnnnnnnnnnnnnnnnnnnnnnnnnnnnnnnnnnnnnnnnnnnnnnnnnnnnnnnnnnnnnnnnnnnnnnnnnnnnnnnnnnnnnnnnnnnnnnnnnnnnnnnnnnnnnnnnnnnnnnnnnnnnnnnnnnnnnnnnnnnnnnnnnnnnnnnnnnnnnnnnnnnnnnnnnnnnnnnnnnnnnnnnnnnnnnnnnnnnnnnnnnnnnnnnnnnnnnnnnnnnnnnnnnnnnnnnnnnnnnnnnnnnnnnnnnnnnnnnnnnnnnnnnnnnnnnnnnnnnnnnnnnnnnnnnnnnnnnnnnnnnnnnnnnnnnnnnnnnnnnnnnnnnnnnnnnnnnnnnnnnnnnnnnnnnnnnnnnnnnnnnnnnnnnnnnnnnnnnnnnnnnnnnnnnnnnnnnnnnnnnnnnnnnnnnnnnnnnnnnnnnnnnnnnnnnnnnnnnnnnnnnnnnnnnnnnnnnnnnnnnnnnnnnnnnnnnnnnnnnnnnnnnnnnnnnnnnnnnnnnnnnnnnnnnnnnnnnnnnnnnnnnnnnnnnnnnnnnnnnnnnnnnnnnnnnnnnnnnnnnnnnnnnnnnnnnnnnnnnnnnnnnnnnnnnnnnnnnnnnnnnnnnnnnnnnnnnnnnnnnnnnnnnnnnnnnnnnnnnnnnnnnnnnnnnnnnnnnnnnnnnnnnnnnnnnnnnnnnnnnnnnnnnnnnnnnnnnnnnnnnnnnnnnnnnnnnnnnnnnnnnnnnnnnnnnnnnnnnnnnnnnnnnnnnnnnnnnnnnnnnnnnnnnnnnnnnnnnnnnnnnnnnnnnnnnnnnnnnnnnnnnnnnnnnnnnnnnnnnnnnnnnnnnnnnnnnnnnnnnnnnnnnnnnnnnnnnnnnnnnnnnnnnnnnnnnnnnnnnnnnnnnnnnnnnnnnnnnnnnnnnnnnnnnnnnnnnnnnnnnnnnnnnnnnnnnnnnnnnnnnnnnnnnnnnnnnnnnnnnnnnnnnnnnnnnnnnnnnnnnnnnnnnnnnnnnnnnnnnnnnnnnnnnnnnnnnnnnnnnnnnnnnnnnnnnnnnnnnnnnnnnnnnnnnnnnnnnnnnnnnnnnnnnnnnnnnnnnnnnnnnnnnnnnnnnnnnnnnnnnnnnnnnnnnnnnnnnnnnnnnnnnnnnnnnnnnnnnnnnnnnnnnnnnnnnnnnnnnnnnnnnnnnnnnnnnnnnnnnnnnnnnnnnnnnnnnnnnnnnnnnnnnnnnnnnnnnnnnnnnnnnnnnnnnnnnnnnnnnnnnnnnnnnnnnnnnnnnnnnnnnnnnnnnnnnnnnnnnnnnnnnnnnnnnnnnnnnnnnnnnnnnnnnnnnnnnnnnnnnnnnnnnnnnnnnnnnnnnnnnnnnnnnnnnnnnnnnnnnnnnnnnnnnnnnnnnnnnnnnnnnnnnnnnnnnnnnnnnnnnnnnnnnnnnnnnnnnnnnnnnnnnnnnnnnnnnnnnnnnnnnnnnnnnnnnnnnnnnnnnnnnnnnnnnnnnnnnnnnnnnnnnnnnnnnnnnnnnnnnnnnnnnnnnnnnnnnnnnnnnnnnnnnnnnnnnnnnnnnnnnnnnnnnnnnnnnnnnnnnnnnnnnnnnnnnnnnnnnnnnnnnnnnnnnnnnnnnnnnnnnnnnnnnnnnnnnnnnnnnnnnnnnnnnnnnnnnnnnnnnnnnnnnnnnnnnnnnnnnnnnnnnnnnnnnnnnnnnnnnnnnnnnnnnnnnnnnnnnnnnnnnnnnnnnnnnnnnnnnnnnnnnnnnnnnnnnnnnnnnnnnnnnnnnnnnnnnnnnnnnnnnnnnnnnnnnnnnnnnnnnnnnnnnnnnnnnnnnnnnnnnnnnnnnnnnnnnnnnnnnnnnnnnnnnnnnnnnnnnnnnnnnnnnnnnnnnnnnnnnnnnnnnnnnnnnnnnnnnnnnnnnnnnnnnnnnnnnnnnnnnnnnnnnnnnnnnnnnnnnnnnnnnnnnnnnnnnnnnnnnnnnnnnnnnnnnnnnnnnnnnnnnnnnnnnnnnnnnnnnnnnnnnnnnnnnnnnnnnnnnnnnnnnnnnnnnnnnnnnnnnnnnnnnnnnnnnnnnnnnnnnnnnnnnnnnnnnnnnnnnnnnnnnnnnnnnnnnnnnnnnnnnnnnnnnnnnnnnnnnnnnnnnnnnnnnnnnnnnnnnnnnnnnnnnnnnnnnnnnnnnnnnnnnnnnnnnnnnnnnnnnnnnnnnnnnnnnnnnnnnnnnnnnnnnnnnnnnnnnnnnnnnnnnnnnnnnnnnnnnnnnnnnnnnnnnnnnnnnnnnnnnnnnnnnnnnnnnnnnnnnnnnnnnnnnnnnnnnnnnnnnnnnnnnnnnnnnnnnnnnnnnnnnnnnnnnnnnnnnnnnnnnnnnnnnnnnnnnnnnnnnnnnnnnnnnnnnnnnnnnnnnnnnnnnnnnnnnnnnnnnnnnnnnnnnnnnnnnnnnnnnnnnnnnnnnnnnnnnnnnnnnnnnnnnnnnnnnnnnnnnnnnnnnnnnnnnnnnnnnnnnnnnnnnnnnnnnnnnnnnnnnnnnnnnnnnnnnnnnnnnnnnnnnnnnnnnnnnnnnnnnnnnnnnnnnnnnnnnnnnnnnnnnnnnnnnnnnnnnnnnnnnnnnnnnnnnnnnnnnnnnnnnnnnnnnnnnnnnnnnnnnnnnnnnnnnnnnnnnnnnnnnnnnnnnnnnnnnnnnnnnnnnnnnnnnnnnnnnnnnnnnnnnnnnnnnnnnnnnnnnnnnnnnnnnnnnnnnnnnnnnnnnnnnnnnnnnnnnnnnnnnnnnnnnnnnnnnnnnnnnnnnnnnnnnnnnnnnnnnnnnnnnnnnnnnnnnnnnnnnnnnnnnnnnnnnnnnnnnnnnnnnnnnnnnnnnnnnnnnnnnnnnnnnnnnnnnnnnnnnnnnnnnnnnnnnnnnnnnnnnnnnnnnnnnnnnnnnnnnnnnnnnnnnnnnnnnnnnnnnnnnnnnnnnnnnnnnnnnnnnnnnnnnnnnnnnnnnnnnnnnnnnnnnnnnnnnnnnnnnnnnnnnnnnnnnnnnnnnnnnnnnnnnnnnnnnnnnnnnnnnnnnnnnnnnnnnnnnnnnnnnnnnnnnnnnnnnnnnnnnnnnnnnnnnnnnnnnnnnnnnnnnnnnnnnnnnnnnnnnnnnnnnnnnnnnnnnnnnnnnnnnnnnnnnnnnnnnnnnnnnnnnnnnnnnnnnnnnnnnnnnnnnnnnnnnnnnnnnnnnnnnnnnnnnnnnnnnnnnnnnnnnnnnnnnnnnnnnnnnnnnnnnnnnnnnnnnnnnnnnnnnnnnnnnnnnnnnnnnnnnnnnnnnnnnnnnnnnnnnnnnnnnnnnnnnnnnnnnnnnnnnnnnnnnnnnnnnnnnnnnnnnnnnnnnnnnnnnnnnnnnnnnnnnnnnnnnnnnnnnnnnnnnnnnnnnnnnnnnnnnnnnnnnnnnnnnnnnnnnnnnnnnnnnnnnnnnnnnnnnnnnnnnnnnnnnnnnnnnnnnnnnnnnnnnnnnnnnnnnnnnnnnnnnnnnnnnnnnnnnnnnnnnnnnnnnnnnnnnnnnnnnnnnnnnnnnnnnnnnnnnnnnnnnnnnnnnnnnnnnnnnnnnnnnnnnnnnnnnnnnnnnnnnnnnnnnnnnnnnnnnnnnnnnnnnnnnnnnnnnnnnnnnnnnnnnnnnnnnnnnnnnnnnnnnnnnnnnnnnnnnnnnnnnnnnnnnnnnnnnnnnnnnnnnnnnnnnnnnnnnnnnnnnnnnnnnnnnnnnnnnnnnnnnnnnnnnnnnnnnnnnnnnnnnnnnnnnnnnnnnnnnnnnnnnnnnnnnnnnnnnnnnnnnnnnnnnnnnnnnnnnnnnnnnnnnnnnnnnnnnnnnnnnnnnnnnnnnnnnnnnnnnnnnnnnnnnnnnnnnnnnnnnnnnnnnnnnnnnnnnnnnnnnnnnnnnnnnnnnnnnnnnnnnnnnnnnnnnnnnnnnnnnnnnnnnnnnnnnnnnnnnnnnnnnnnnnnnnnnnnnnnnnnnnnnnnnnnnnnnnnnnnnnnnnnnnnnnnnnnnnnnnnnnnnnnnnnnnnnnnnnnnnnnnnnnnnnnnnnnnnnnnnnnnnnnnnnnnnnnnnnnnnnnnnnnnnnnnnnnnnnnnnnnnnnnnnnnnnnnnnnnnnnnnnnnnnnnnnnnnnnnnnnnnnnnnnnnnnnnnnnnnnnnnnnnnnnnnnnnnnnnnnnnnnnnnnnnnnnnnnnnnnnnnnnnnnnnnnnnnnnnnnnnnnnnnnnnnnnnnnnnnnnnnnnnnnnnnnnnnnnnnnnnnnnnnnnnnnnnnnnnnnnnnnnnnnnnnnnnnnnnnnnnnnnnnnnnnnnnnnnnnnnnnnnnnnnnnnnnnnnnnnnnnnnnnnnnnnnnnnnnnnnnnnnnnnnnnnnnnnnnnnnnnnnnnnnnnnnnnnnnnnnnnnnnnnnnnnnnnnnnnnnnnnnnnnnnnnnnnnnnnnnnnnnnnnnnnnnnnnnnnnnnnnnnnnnnnnnnnnnnnnnnnnnnnnnnnnnnnnnnnnnnnnnnnnnnnnnnnnnnnnnnnnnnnnnnnnnnnnnnnnnnnnnnnnnnnnnnnnnnnnnnnnnnnnnnnnnnnnnnnnnnnnnnnnnnnnnnnnnnnnnnnnnnnnnnnnnnnnnnnnnnnnnnnnnnnnnnnnnnnnnnnnnnnnnnnnnnnnnnnnnnnnnnnnnnnnnnnnnnnnnnnnnnnnnnnnnnnnnnnnnnnnnnnnnnnnnnnnnnnnnnnnnnnnnnnnnnnnnnnnnnnnnnnnnnnnnnnnnnnnnnnnnnnnnnnnnnnnnnnnnnnnnnnnnnnnnnnnnnnnnnnnnnnnnnnnnnnnnnnnnnnnnnnnnnnnnnnnnnnnnnnnnnnnnnnnnnnnnnnnnnnnnnnnnnnnnnnnnnnnnnnnnnnnnnnnnnnnnnnnnnnnnnnnnnnnnnnnnnnnnnnnnnnnnnnnnnnnnnnnnnnnnnnnnnnnnnnnnnnnnnnnnnnnnnnnnnnnnnnnnnnnnnnnnnnnnnnnnnnnnnnnnnnnnnnnnnnnnnnnnnnnnnnnnnnnnnnnnnnnnnnnnnnnnnnnnnnnnnnnnnnnnnnnnnnnnnnnnnnnnnnnnnnnnnnnnnnnnnnnnnnnnnnnnnnnnnnnnnnnnnnnnnnnnnnnnnnnnnnnnnnnnnnnnnnnnnnnnnnnnnnnnnnnnnnnnnnnnnnnnnnnnnnnnnnnnnnnnnnnnnnnnnnnnnnnnnnnnnnnnnnnnnnnnnnnnnnnnnnnnnnnnnnnnnnnnnnnnnnnnnnnnnnnnnnnnnnnnnnnnnnnnnnnnnnnnnnnnnnnnnnnnnnnnnnnnnnnnnnnnnnnnnnnnnnnnnnnnnnnnnnnnnnnnnnnnnnnnnnnnnnnnnnnnnnnnnnnnnnnnnnnnnnnnnnnnnnnnnnnnnnnnnnnnnnnnnnnnnnnnnnnnnnnnnnnnnnnnnnnnnnnnnnnnnnnnnnnnnnnnnnnnnnnnnnnnnnnnnnnnnnnnnnnnnnnnnnnnnnnnnnnnnnnnnnnnnnnnnnnnnnnnnnnnnnnnnnnnnnnnnnnnnnnnnnnnnnnnnnnnnnnnnnnnnnnnnnnnnnnnnnnnnnnnnnnnnnnnnnnnnnnnnnnnnnnnnnnnnnnnnnnnnnnnnnnnnnnnnnnnnnnnnnnnnnnnnnnnnnnnnnnnnnnnnnnnnnnnnnnnnnnnnnnnnnnnnnnnnnnnnnnnnnnnnnnnnnnnnnnnnnnnnnnnnnnnnnnnnnnnnnnnnnnnnnnnnnnnnnnnnnnnnnnnnnnnnnnnnnnnnnnnnnnnnnnnnnnnnnnnnnnnnnnnnnnnnnnnnnnnnnnnnnnnnnnnnnnnnnnnnnnnnnnnnnnnnnnnnnnnnnnnnnnnnnnnnnnnnnnnnnnnnnnnnnnnnnnnnnnnnnnnnnnnnnnnnnnnnnnnnnnnnnnnnnnnnnnnnnnnnnnnnnnnnnnnnnnnnnnnnnnnnnnnnnnnnnnnnnnnnnnnnnnnnnnnnnnnnnnnnnnnnnnnnnnnnnnnnnnnnnnnnnnnnnnnnnnnnnnnnnnnnnnnnnnnnnnnnnnnnnnnnnnnnnnnnnnnnnnnnnnnnnnnnnnnnnnnnnnnnnnnnnnnnnnnnnnnnnnnnnnnnnnnnnnnnnnnnnnnnnnnnnnnnnnnnnnnnnnnnnnnnnnnnnnnnnnnnnnnnnnnnnnnnnnnnnnnnnnnnnnnnnnnnnnnnnnnnnnnnnnnnnnnnnnnnnnnnnnnnnnnnnnnnnnnnnnnnnnnnnnnnnnnnnnnnnnnnnnnnnnnnnnnnnnnnnnnnnnnnnnnnnnnnnnnnnnnnnnnnnnnnnnnnnnnnnnnnnnnnnnnnnnnnnnnnnnnnnnnnnnnnnnnnnnnnnnnnnnnnnnnnnnnnnnnnnnnnnnnnnnnnnnnnnnnnnnnnnnnnnnnnnnnnnnnnnnnnnnnnnnnnnnnnnnnnnnnnnnnnnnnnnnnnnnnnnnnnnnnnnnnnnnnnnnnnnnnnnnnnnnnnnnnnnnnnnnnnnnnnnnnnnnnnnnnnnnnnnnnnnnnnnnnnnnnnnnnnnnnnnnnnnnnnnnnnnnnnnnnnnnnnnnnnnnnnnnnnnnnnnnnnnnnnnnnnnnnnnnnnnnnnnnnnnnnnnnnnnnnnnnnnnnnnnnnnnnnnnnnnnnnnnnnnnnnnnnnnnnnnnnnnnnnnnnnnnnnnnnnnnnnnnnnnnnnnnnnnnnnnnnnnnnnnnnnnnnnnnnnnnnnnnnnnnnnnnnnnnnnnnnnnnnnnnnnnnnnnnnnnnnnnnnnnnnnnnnnnnnnnnnnnnnnnnnnnnnnnnnnnnnnnnnnnnnnnnnnnnnnnnnnnnnnnnnnnnnnnnnnnnnnnnnnnnnnnnnnnnnnnnnnnnnnnnnnnnnnnnnnnnnnnnnnnnnnnnnnnnnnnnnnnnnnnnnnnnnnnnnnnnnnnnnnnnnnnnnnnnnnnnnnnnnnnnnnnnnnnnnnnnnnnnnnnnnnnnnnnnnnnnnnnnnnnnnnnnnnnnnnnnnnnnnnnnnnnnnnnnnnnnnnnnnnnnnnnnnnnnnnnnnnnnnnnnnnnnnnnnnnnnnnnnnnnnnnnnnnnnnnnnnnnnnnnnnnnnnnnnnnnnnnnnnnnnnnnnnnnnnnnnnnnnnnnnnnnnnnnnnnnnnnnnnnnnnnnnnnnnnnnnnnnnnnnnnnnnnnnnnnnnnnnnnnnnnnnnnnnnnnnnnnnnnnnnnnnnnnnnnnnnnnnnnnnnnnnnnnnnnnnnnnnnnnnnnnnnnnnnnnnnnnnnnnnnnnnnnnnnnnnnnnnnnnnnnnnnnnnnnnnnnnnnnnnnnnnnnnnnnnnnnnnnnnnnnnnnnnnnnnnnnnnnnnnnnnnnnnnnnnnnnnnnnnnnnnnnnnnnnnnnnnnnnnnnnnnnnnnnnnnnnnnnnnnnnnnnnnnnnnnnnnnnnnnnnnnnnnnnnnnnnnnnnnnnnnnnnnnnnnnnnnnnnnnnnnnnnnnnnnnnnnnnnnnnnnnnnnnnnnnnnnnnnnnnnnnnnnnnnnnnnnnnnnnnnnnnnnnnnnnnnnnnnnnnnnnnnnnnnnnnnnnnnnnnnnnnnnnnnnnnnnnnnnnnnnnnnnnnnnnnnnnnnnnnnnnnnnnnnnnnnnnnnnnnnnnnnnnnnnnnnnnnnnnnnnnnnnnnnnnnnnnnnnnnnnnnnnnnnnnnnnnnnnnnnnnnnnnnnnnnnnnnnnnnnnnnnnnnnnnnnnnnnnnnnnnnnnnnnnnnnnnnnnnnnnnnnnnnnnnnnnnnnnnnnnnnnnnnnnnnnnnnnnnnnnnnnnnnnnnnnnnnnnnnnnnnnnnnnnnnnnnnnnnnnnnnnnnnnnnnnnnnnnnnnnnnnnnnnnnnnnnnnnnnnnnnnnnnnnnnnnnnnnnnnnnnnnnnnnnnnnnnnnnnnnnnnnnnnnnnnnnnnnnnnnnnnnnnnnnnnnnnnnnnnnnnnnnnnnnnnnnnnnnnnnnnnnnnnnnnnnnnnnnnnnnnnnnnnnnnnnnnnnnnnnnnnnnnnnnnnnnnnnnnnnnnnnnnnnnnnnnnnnnnnnnnnnnnnnnnnnnnnnnnnnnnnnnnnnnnnnnnnnnnnnnnnnnnnnnnnnnnnnnnnnnnnnnnnnnnnnnnnnnnnnnnnnnnnnnnnnnnnnnnnnnnnnnnnnnnnnnnnnnnnnnnnnnnnnnnnnnnnnnnnnnnnnnnnnnnnnnnnnnnnnnnnnnnnnnnnnnnnnnnnnnnnnnnnnnnnnnnnnnnnnnnnnnnnnnnnnnnnnnnnnnnnnnnnnnnnnnnnnnnnnnnnnnnnnnnnnnnnnnnnnnnnnnnnnnnnnnnnnnnnnnnnnnnnnnnnnnnnnnnnnnnnnnnnnnnnnnnnnnnnnnnnnnnnnnnnnnnnnnnnnnnnnnnnnnnnnnnnnnnnnnnnnnnnnnnnnnnnnnnnnnnnnnnnnnnnnnnnnnnnnnnnnnnnnnnnnnnnnnnnnnnnnnnnnnnnnnnnnnnnnnnnnnnnnnnnnnnnnnnnnnnnnnnnnnnnnnnnnnnnnnnnnnnnnnnnnnnnnnnnnnnnnnnnnnnnnnnnnnnnnnnnnnnnnnnnnnnnnnnnnnnnnnnnnnnnnnnnnnnnnnnnnnnnnnnnnnnnnnnnnnnnnnnnnnnnnnnnnnnnnnnnnnnnnnnnnnnnnnnnnnnnnnnnnnnnnnnnnnnnnnnnnnnnnnnnnnnnnnnnnnnnnnnnnnnnnnnnnnnnnnnnnnnnnnnnnnnnnnnnnnnnnnnnnnnnnnnnnnnnnnnnnnnnnnnnnnnnnnnnnnnnnnnnnnnnnnnnnnnnnnnnnnnnnnnnnnnnnnnnnnnnnnnnnnnnnnnnnnnnnnnnnnnnnnnnnnnnnnnnnnnnnnnnnnnnnnnnnnnnnnnnnnnnnnnnnnnnnnnnnnnnnnnnnnnnnnnnnnnnnnnnnnnnnnnnnnnnnnnnnnnnnnnnnnnnnnnnnnnnnnnnnnnnnnnnnnnnnnnnnnnnnnnnnnnnnnnnnnnnnnnnnnnnnnnnnnnnnnnnnnnnnnnnnnnnnnnnnnnnnnnnnnnnnnnnnnnnnnnnnnnnnnnnnnnnnnnnnnnnnnnnnnnnnnnnnnnnnnnnnnnnnnnnnnnnnnnnnnnnnnnnnnnnnnnnnnnnnnnnnnnnnnnnnnnnnnnnnnnnnnnnnnnnnnnnnnnnnnnnnnnnnnnnnnnnnnnnnnnnnnnnnnnnnnnnnnnnnnnnnnnnnnnnnnnnnnnnnnnnnnnnnnnnnnnnnnnnnnnnnnnnnnnnnnnnnnnnnnnnnnnnnnnnnnnnnnnnnnnnnnnnnnnnnnnnnnnnnnnnnnnnnnnnnnnnnnnnnnnnnnnnnnnnnnnnnnnnnnnnnnnnnnnnnnnnnnnnnnnnnnnnnnnnnnnnnnnnnnnnnnnnnnnnnnnnnnnnnnnnnnnnnnnnnnnnnnnnnnnnnnnnnnnnnnnnnnnnnnnnnnnnnnnnnnnnnnnnnnnnnnnnnnnnnnnnnnnnnnnnnnnnnnnnnnnnnnnnnnnnnnnnnnnnnnnnnnnnnnnnnnnnnnnnnnnnnnnnnnnnnnnnnnnnnnnnnnnnnnnnnnnnnnnnnnnnnnnnnnnnnnnnnnnnnnnnnnnnnnnnnnnnnnnnnnnnnnnnnnnnnnnnnnnnnnnnnnnnnnnnnnnnnnnnnnnnnnnnnnnnnnnnnnnnnnnnnnnnnnnnnnnnnnnnnnnnnnnnnnnnnnnnnnnnnnnnnnnnnnnnnnnnnnnnnnnnnnnnnnnnnnnnnnnnnnnnnnnnnnnnnnnnnnnnnnnnnnnnnnnnnnnnnnnnnnnnnnnnnnnnnnnnnnnnnnnnnnnnnnnnnnnnnnnnnnnnnnnnnnnnnnnnnnnnnnnnnnnnnnnnnnnnnnnnnnnnnnnnnnnnnnnnnnnnnnnnnnnnnnnnnnnnnnnnnnnnnnnnnnnnnnnnnnnnnnnnnnnnnnnnnnnnnnnnnnnnnnnnnnnnnnnnnnnnnnnnnnnnnnnnnnnnnnnnnnnnnnnnnnnnnnnnnnnnnnnnnnnnnnnnnnnnnnnnnnnnnnnnnnnnnnnnnnnnnnnnnnnnnnnnnnnnnnnnnnnnnnnnnnnnnnnnnnnnnnnnnnnnnnnnnnnnnnnnnnnnnnnnnnnnnnnnnnnnnnnnnnnnnnnnnnnnnnnnnnnnnnnnnnnnnnnnnnnnnnnnnnnnnnnnnnnnnnnnnnnnnnnnnnnnnnnnnnnnnnnnnnnnnnnnnnnnnnnnnnnnnnnnnnnnnnnnnnnnnnnnnnnnnnnnnnnnnnnnnnnnnnnnnnnnnnnnnnnnnnnnnnnnnnnnnnnnnnnnnnnnnnnnnnnnnnnnnnnnnnnnnnnnnnnnnnnnnnnnnnnnnnnnnnnnnnnnnnnnnnnnnnnnnnnnnnnnnnnnnnnnnnnnnnnnnnnnnnnnnnnnnnnnnnnnnnnnnnnnnnnnnnnnnnnnnnnnnnnnnnnnnnnnnnnnnnnnnnnnnnnnnnnnnnnnnnnnnnnnnnnnnnnnnnnnnnnnnnnnnnnnnnnnnnnnnnnnnnnnnnnnnnnnnnnnnnnnnnnnnnnnnnnnnnnnnnnnnnnnnnnnnnnnnnnnnnnnnnnnnnnnnnnnnnnnnnnnnnnnnnnnnnnnnnnnnnnnnnnnnnnnnnnnnnnnnnnnnnnnnnnnnnnnnnnnnnnnnnnnnnnnnnnnnnnnnnnnnnnnnnnnnnnnnnnnnnnnnnnnnnnnnnnnnnnnnnnnnnnnnnnnnnnnnnnnnnnnnnnnnnnnnnnnnnnnnnnnnnnnnnnnnnnnnnnnnnnnnnnnnnnnnnnnnnnnnnnnnnnnnnnnnnnnnnnnnnnnnnnnnnnnnnnnnnnnnnnnnnnnnnnnnnnnnnnnnnnnnnnnnnnnnnnnnnnnnnnnnnnnnnnnnnnnnnnnnnnnnnnnnnnnnnnnnnnnnnnnnnnnnnnnnnnnnnnnnnnnnnnnnnnnnnnnnnnnnnnnnnnnnnnnnnnnnnnnnnnnnnnnnnnnnnnnnnnnnnnnnnnnnnnnnnnnnnnnnnnnnnnnnnnnnnnnnnnnnnnnnnnnnnnnnnnnnnnnnnnnnnnnnnnnnnnnnnnnnnnnnnnnnnnnnnnnnnnnnnnnnnnnnnnnnnnnnnnnnnnnnnnnnnnnnnnnnnnnnnnnnnnnnnnnnnnnnnnnnnnnnnnnnnnnnnnnnnnnnnnnnnnnnnnnnnnnnnnnnnnnnnnnnnnnnnnnnnnnnnnnnnnnnnnnnnnnnnnnnnnnnnnnnnnnnnnnnnnnnnnnnnnnnnnnnnnnnnnnnnnnnnnnnnnnnnnnnnnnnnnnnnnnnnnnnnnnnnnnnnnnnnnnnnnnnnnnnnnnnnnnnnnnnnnnnnnnnnnnnnnnnnnnnnnnnnnnnnnnnnnnnnnnnnnnnnnnnnnnnnnnnnnnnnnnnnnnnnnnnnnnnnnnnnnnnnnnnnnnnnnnnnnnnnnnnnnnnnnnnnnnnnnnnnnnnnnnnnnnnnnnnnnnnnnnnnnnnnnnnnnnnnnnnnnnnnnnnnnnnnnnnnnnnnnnnnnnnnnnnnnnnnnnnnnnnnnnnnnnnnnnnnnnnnnnnnnnnnnnnnnnnnnnnnnnnnnnnnnnnnnnnnnnnnnnnnnnnnnnnnnnnnnnnnnnnnnnnnnnnnnnnnnnnnnnnnnnnnnnnnnnnnnnnnnnnnnnnnnnnnnnnnnnnnnnnnnnnnnnnnnnnnnnnnnnnnnnnnnnnnnnnnnnnnnnnnnnnnnnnnnnnnnnnnnnnnnnnnnnnnnnnnnnnnnnnnnnnnnnnnnnnnnnnnnnnnnnnnnnnnnnnnnnnnnnnnnnnnnnnnnnnnnnnnnnnnnnnnnnnnnnnnnnnnnnnnnnnnnnnnnnnnnnnnnnnnnnnnnnnnnnnnnnnnnnnnnnnnnnnnnnnnnnnnnnnnnnnnnnnnnnnnnnnnnnnnnnnnnnnnnnnnnnnnnnnnnnnnnnnnnnnnnnnnnnnnnnnnnnnnnnnnnnnnnnnnnnnnnnnnnnnnnnnnnnnnnnnnnnnnnnnnnnnnnnnnnnnnnnnnnnnnnnnnnnnnnnnnnnnnnnnnnnnnnnnnnnnnnnnnnnnnnnnnnnnnnnnnnnnnnnnnnnnnnnnnnnnnnnnnnnnnnnnnnnnnnnnnnnnnnnnnnnnnnnnnnnnnnnnnnnnnnnnnnnnnnnnnnnnnnnnnnnnnnnnnnnnnnnnnnnnnnnnnnnnnnnnnnnnnnnnnnnnnnnnnnnnnnnnnnnnnnnnnnnnnnnnnnnnnnnnnnnnnnnnnnnnnnnnnnnnnnnnnnnnnnnnnnnnnnnnnnnnnnnnnnnnnnnnnnnnnnnnnnnnnnnnnnnnnnnnnnnnnnnnnnnnnnnnnnnnnnnnnnnnnnnnnnnnnnnnnnnnnnnnnnnnnnnnnnnnnnnnnnnnnnnnnnnnnnnnnnnnnnnnnnnnnnnnnnnnnnnnnnnnnnnnnnnnnnnnnnnnnnnnnnnnnnnnnnnnnnnnnnnnnnnnnnnnnnnnnnnnnnnnnnnnnnnnnnnnnnnnnnnnnnnnnnnnnnnnnnnnnnnnnnnnnnnnnnnnnnnnnnnnnnnnnnnnnnnnnnnnnnnnnnnnnnnnnnnnnnnnnnnnnnnnnnnnnnnnnnnnnnnnnnnnnnnnnnnnnnnnnnnnnnnnnnnnnnnnnnnnnnnnnnnnnnnnnnnnnnnnnnnnnnnnnnnnnnnnnnnnnnnnnnnnnnnnnnnnnnnnnnnnnnnnnnnnnnnnnnnnnnnnnnnnnnnnnnnnnnnnnnnnnnnnnnnnnnnnnnnnnnnnnnnnnnnnnnnnnnnnnnnnnnnnnnnnnnnnnnnnnnnnnnnnnnnnnnnnnnnnnnnnnnnnnnnnnnnnnnnnnnnnnnnnnnnnnnnnnnnnnnnnnnnnnnnnnnnnnnnnnnnnnnnnnnnnnnnnnnnnnnnnnnnnnnnnnnnnnnnnnnnnnnnnnnnnnnnnnnnnnnnnnnnnnnnnnnnnnnnnnnnnnnnnnnnnnnnnnnnnnnnnnnnnnnnnnnnnnnnnnnnnnnnnnnnnnnnnnnnnnnnnnnnnnnnnnnnnnnnnnnnnnnnnnnnnnnnnnnnnnnnnnnnnnnnnnnnnnnnnnnnnnnnnnnnnnnnnnnnnnnnnnnnnnnnnnnnnnnnnnnnnnnnnnnnnnnnnnnnnnnnnnnnnnnnnnnnnnnnnnnnnnnnnnnnnnnnnnnnnnnnnnnnnnnnnnnnnnnnnnnnnnnnnnnnnnnnnnnnnnnnnnnnnnnnnnnnnnnnnnnnnnnnnnnnnnnnnnnnnnnnnnnnnnnnnnnnnnnnnnnnnnnnnnnnnnnnnnnnnnnnnnnnnnnnnnnnnnnnnnnnnnnnnnnnnnnnnnnnnnnnnnnnnnnnnnnnnnnnnnnnnnnnnnnnnnnnnnnnnnnnnnnnnnnnnnnnnnnnnnnnnnnnnnnnnnnnnnnnnnnnnnnnnnnnnnnnnnnnnnnnnnnnnnnnnnnnnnnnnnnnnnnnnnnnnnnnnnnnnnnnnnnnnnnnnnnnnnnnnnnnnnnnnnnnnnnnnnnnnnnnnnnnnnnnnnnnnnnnnnnnnnnnnnnnnnnnnnnnnnnnnnnnnnnnnnnnnnnnnnnnnnnnnnnnnnnnnnnnnnnnnnnnnnnnnnnnnnnnnnnnnnnnnnnnnnnnnnnnnnnnnnnnnnnnnnnnnnnnnnnnnnnnnnnnnnnnnnnnnnnnnnnnnnnnnnnnnnnnnnnnnnnnnnnnnnnnnnnnnnnnnnnnnnnnnnnnnnnnnnnnnnnnnnnnnnnnnnnnnnnnnnnnnnnnnnnnnnnnnnnnnnnnnnnnnnnnnnnnnnnnnnnnnnnnnnnnnnnnnnnnnnnnnnnnnnnnnnnnnnnnnnnnnnnnnnnnnnnnnnnnnnnnnnnnnnnnnnnnnnnnnnnnnnnnnnnnnnnnnnnnnnnnnnnnnnnnnnnnnnnnnnnnnnnnnnnnnnnnnnnnnnnnnnnnnnnnnnnnnnnnnnnnnnnnnnnnnnnnnnnnnnnnnnnnnnnnnnnnnnnnnnnnnnnnnnnnnnnnnnnnnnnnnnnnnnnnnnnnnnnnnnnnnnnnnnnnnnnnnnnnnnnnnnnnnnnnnnnnnnnnnnnnnnnnnnnnnnnnnnnnnnnnnnnnnnnnnnnnnnnnnnnnnnnnnnnnnnnnnnnnnnnnnnnnnnnnnnnnnnnnnnnnnnnnnnnnnnnnnnnnnnnnnnnnnnnnnnnnnnnnnnnnnnnnnnnnnnnnnnnnnnnnnnnnnnnnnnnnnnnnnnnnnnnnnnnnnnnnnnnnnnnnnnnnnnnnnnnnnnnnnnnnnnnnnnnnnnnnnnnnnnnnnnnnnnnnnnnnnnnnnnnnnnnnnnnnnnnnnnnnnnnnnnnnnnnnnnnnnnnnnnnnnnnnnnnnnnnnnnnnnnnnnnnnnnnnnnnnnnnnnnnnnnnnnnnnnnnnnnnnnnnnnnnnnnnnnnnnnnnnnnnnnnnnnnnnnnnnnnnnnnnnnnnnnnnnnnnnnnnnnnnnnnnnnnnnnnnnnnnnnnnnnnnnnnnnnnnnnnnnnnnnnnnnnnnnnnnnnnnnnnnnnnnnnnnnnnnnnnnnnnnnnnnnnnnnnnnnnnnnnnnnnnnnnnnnnnnnnnnnnnnnnnnnnnnnnnnnnnnnnnnnnnnnnnnnnnnnnnnnnnnnnnnnnnnnnnnnnnnnnnnnnnnnnnnnnnnnnnnnnnnnnnnnnnnnnnnnnnnnnnnnnnnnnnnnnnnnnnnnnnnnnnnnnnnnnnnnnnnnnnnnnnnnnnnnnnnnnnnnnnnnnnnnnnnnnnnnnnnnnnnnnnnnnnnnnnnnnnnnnnnnnnnnnnnnnnnnnnnnnnnnnnnnnnnnnnnnnnnnnnnnnnnnnnnnnnnnnnnnnnnnnnnnnnnnnnnnnnnnnnnnnnnnnnnnnnnnnnnnnnnnnnnnnnnnnnnnnnnnnnnnnnnnnnnnnnnnnnnnnnnnnnnnnnnnnnnnnnnnnnnnnnnnnnnnnnnnnnnnnnnnnnnnnnnnnnnnnnnnnnnnnnnnnnnnnnnnnnnnnnnnnnnnnnnnnnnnnnnnnnnnnnnnnnnnnnnnnnnnnnnnnnnnnnnnnnnnnnnnnnnnnnnnnnnnnnnnnnnnnnnnnnnnnnnnnnnnnnnnnnnnnnnnnnnnnnnnnnnnnnnnnnnnnnnnnnnnnnnnnnnnnnnnnnnnnnnnnnnnnnnnnnnnnnnnnnnnnnnnnnnnnnnnnnnnnnnnnnnnnnnnnnnnnnnnnnnnnnnnnnnnnnnnnnnnnnnnnnnnnnnnnnnnnnnnnnnnnnnnnnnnnnnnnnnnnnnnnnnnnnnnnnnnnnnnnnnnnnnnnnnnnnnnnnnnnnnnnnnnnnnnnnnnnnnnnnnnnnnnnnnnnnnnnnnnnnnnnnnnnnnnnnnnnnnnnnnnnnnnnnnnnnnnnnnnnnnnnnnnnnnnnnnnnnnnnnnnnnnnnnnnnnnnnnnnnnnnnnnnnnnnnnnnnnnnnnnnnnnnnnnnnnnnnnnnnnnnnnnnnnnnnnnnnnnnnnnnnnnnnnnnnnnnnnnnnnnnnnnnnnnnnnnnnnnnnnnnnnnnnnnnnnnnnnnnnnnnnnnnnnnnnnnnnnnnnnnnnnnnnnnnnnnnnnnnnnnnnnnnnnnnnnnnnnnnnnnnnnnnnnnnnnnnnnnnnnnnnnnnnnnnnnnnnnnnnnnnnnnnnnnnnnnnnnnnnnnnnnnnnnnnnnnnnnnnnnnnnnnnnnnnnnnnnnnnnnnnnnnnnnnnnnnnnnnnnnnnnnnnnnnnnnnnnnnnnnnnnnnnnnnnnnnnnnnnnnnnnnnnnnnnnnnnnnnnnnnnnnnnnnnnnnnnnnnnnnnnnnnnnnnnnnnnnnnnnnnnnnnnnnnnnnnnnnnnnnnnnnnnnnnnnnnnnnnnnnnnnnnnnnnnnnnnnnnnnnnnnnnnnnnnnnnnnnnnnnnnnnnnnnnnnnnnnnnnnnnnnnnnnnnnnnnnnnnnnnnnnnnnnnnnnnnnnnnnnnnnnnnnnnnnnnnnnnnnnnnnnnnnnnnnnnnnnnnnnnnnnnnnnnnnnnnnnnnnnnnnnnnnnnnnnnnnnnnnnnnnnnnnnnnnnnnnnnnnnnnnnnnnnnnnnnnnnnnnnnnnnnnnnnnnnnnnnnnnnnnnnnnnnnnnnnnnnnnnnnnnnnnnnnnnnnnnnnnnnnnnnnnnnnnnnnnnnnnnnnnnnnnnnnnnnnnnnnnnnnnnnnnnnnnnnnnnnnnnnnnnnnnnnnnnnnnnnnnnnnnnnnnnnnnnnnnnnnnnnnnnnnnnnnnnnnnnnnnnnnnnnnnnnnnnnnnnnnnnnnnnnnnnnnnnnnnnnnnnnnnnnnnnnnnnnnnnnnnnnnnnnnnnnnnnnnnnnnnnnnnnnnnnnnnnnnnnnnnnnnnnnnnnnnnnnnnnnnnnnnnnnnnnnnnnnnnnnnnnnnnnnnnnnnnnnnnnnnnnnnnnnnnnnnnnnnnnnnnnnnnnnnnnnnnnnnnnnnnnnnnnnnnnnnnnnnnnnnnnnnnnnnnnnnnnnnnnnnnnnnnnnnnnnnnnnnnnnnnnnnnnnnnnnnnnnnnnnnnnnnnnnnnnnnnnnnnnnnnnnnnnnnnnnnnnnnnnnnnnnnnnnnnnnnnnnnnnnnnnnnnnnnnnnnnnnnnnnnnnnnnnnnnnnnnnnnnnnnnnnnnnnnnnnnnnnnnnnnnnnnnnnnnnnnnnnnnnnnnnnnnnnnnnnnnnnnnnnnnnnnnnnnnnnnnnnnnnnnnnnnnnnnnnnnnnnnnnnnnnnnnnnnnnnnnnnnnnnnnnnnnnnnnnnnnnnnnnnnnnnnnnnnnnnnnnnnnnnnnnnnnnnnnnnnnnnnnnnnnnnnnnnnnnnnnnnnnnnnnnnnnnnnnnnnnnnnnnnnnnnnnnnnnnnnnnnnnnnnnnnnnnnnnnnnnnnnnnnnnnnnnnnnnnnnnnnnnnnnnnnnnnnnnnnnnnnnnnnnnnnnnnnnnnnnnnnnnnnnnnnnnnnnnnnnnnnnnnnnnnnnnnnnnnnnnnnnnnnnnnnnnnnnnnnnnnnnnnnnnnnnnnnnnnnnnnnnnnnnnnnnnnnnnnnnnnnnnnnnnnnnnnnnnnnnnnnnnnnnnnnnnnnnnnnnnnnnnnnnnnnnnnnnnnnnnnnnnnnnnnnnnnnnnnnnnnnnnnnnnnnnnnnnnnnnnnnnnnnnnnnnnnnnnnnnnnnnnnnnnnnnnnnnnnnnnnnnnnnnnnnnnnnnnnnnnnnnnnnnnnnnnnnnnnnnnnnnnnnnnnnnnnnnnnnnnnnnnnnnnnnnnnnnnnnnnnnnnnnnnnnnnnnnnnnnnnnnnnnnnnnnnnnnnnnnnnnnnnnnnnnnnnnnnnnnnnnnnnnnnnnnnnnnnnnnnnnnnnnnnnnnnnnnnnnnnnnnnnnnnnnnnnnnnnnnnnnnnnnnnnnnnnnnnnnnnnnnnnnnnnnnnnnnnnnnnnnnnnnnnnnnnnnnnnnnnnnnnnnnnnnnnnnnnnnnnnnnnnnnnnnnnnnnnnnnnnnnnnnnnnnnnnnnnnnnnnnnnnnnnnnnnnnnnnnnnnnnnnnnnnnnnnnnnnnnnnnnnnnnnnnnnnnnnnnnnnnnnnnnnnnnnnnnnnnnnnnnnnnnnnnnnnnnnnnnnnnnnnnnnnnnnnnnnnnnnnnnnnnnnnnnnnnnnnnnnnnnnnnnnnnnnnnnnnnnnnnnnnnnnnnnnnnnnnnnnnnnnnnnnnnnnnnnnnnnnnnnnnnnnnnnnnnnnnnnnnnnnnnnnnnnnnnnnnnnnnnnnnnnnnnnnnnnnnnnnnnnnnnnnnnnnnnnnnnnnnnnnnnnnnnnnnnnnnnnnnnnnnnnnnnnnnnnnnnnnnnnnnnnnnnnnnnnnnnnnnnnnnnnnnnnnnnnnnnnnnnnnnnnnnnnnnnnnnnnnnnnnnnnnnnnnnnnnnnnnnnnnnnnnnnnnnnnnnnnnnnnnnnnnnnnnnnnnnnnnnnnnnnnnnnnnnnnnnnnnnnnnnnnnnnnnnnnnnnnnnnnnnnnnnnnnnnnnnnnnnnnnnnnnnnnnnnnnnnnnnnnnnnnnnnnnnnnnnnnnnnnnnnnnnnnnnnnnnnnnnnnnnnnnnnnnnnnnnnnnnnnnnnnnnnnnnnnnnnnnnnnnnnnnnnnnnnnnnnnnnnnnnnnnnnnnnnnnnnnnnnnnnnnnnnnnnnnnnnnnnnnnnnnnnnnnnnnnnnnnnnnnnnnnnnnnnnnnnnnnnnnnnnnnnnnnnnnnnnnnnnnnnnnnnnnnnnnnnnnnnnnnnnnnnnnnnnnnnnnnnnnnnnnnnnnnnnnnnnnnnnnnnnnnnnnnnnnnnnnnnnnnnnnnnnnnnnnnnnnnnnnnnnnnnnnnnnnnnnnnnnnnnnnnnnnnnnnnnnnnnnnnnnnnnnnnnnnnnnnnnnnnnnnnnnnnnnnnnnnnnnnnnnnnnnnnnnnnnnnnnnnnnnnnnnnnnnnnnnnnnnnnnnnnnnnnnnnnnnnnnnnnnnnnnnnnnnnnnnnnnnnnnnnnnnnnnnnnnnnnnnnnnnnnnnnnnnnnnnnnnnnnnnnnnnnnnnnnnnnnnnnnnnnnnnnnnnnnnnnnnnnnnnnnnnnnnnnnnnnnnnnnnnnnnnnnnnnnnnnnnnnnnnnnnnnnnnnnnnnnnnnnnnnnnnnnnnnnnnnnnnnnnnnnnnnnnnnnnnnnnnnnnnnnnnnnnnnnnnnnnnnnnnnnnnnnnnnnnnnnnnnnnnnnnnnnnnnnnnnnnnnnnnnnnnnnnnnnnnnnnnnnnnnnnnnnnnnnnnnnnnnnnnnnnnnnnnnnnnnnnnnnnnnnnnnnnnnnnnnnnnnnnnnnnnnnnnnnnnnnnnnnnnnnnnnnnnnnnnnnnnnnnnnnnnnnnnnnnnnnnnnnnnnnnnnnnnnnnnnnnnnnnnnnnnnnnnnnnnnnnnnnnnnnnnnnnnnnnnnnnnnnnnnnnnnnnnnnnnnnnnnnnnnnnnnnnnnnnnnnnnnnnnnnnnnnnnnnnnnnnnnnnnnnnnnnnnnnnnnnnnnnnnnnnnnnnnnnnnnnnnnnnnnnnnnnnnnnnnnnnnnnnnnnnnnnnnnnnnnnnnnnnnnnnnnnnnnnnnnnnnnnnnnnnnnnnnnnnnnnnnnnnnnnnnnnnnnnnnnnnnnnnnnnnnnnnnnnnnnnnnnnnnnnnnnnnnnnnnnnnnnnnnnnnnnnnnnnnnnnnnnnnnnnnnnnnnnnnnnnnnnnnnnnnnnnnnnnnnnnnnnnnnnnnnnnnnnnnnnnnnnnnnnnnnnnnnnnnnnnnnnnnnnnnnnnnnnnnnnnnnnnnnnnnnnnnnnnnnnnnnnnnnnnnnnnnnnnnnnnnnnnnnnnnnnnnnnnnnnnnnnnnnnnnnnnnnnnnnnnnnnnnnnnnnnnnnnnnnnnnnnnnnnnnnnnnnnnnnnnnnnnnnnnnnnnnnnnnnnnnnnnnnnnnnnnnnnnnnnnnnnnnnnnnnnnnnnnnnnnnnnnnnnnnnnnnnnnnnnnnnnnnnnnnnnnnnnnnnnnnnnnnnnnnnnnnnnnnnnnnnnnnnnnnnnnnnnnnnnnnnnnnnnnnnnnnnnnnnnnnnnnnnnnnnnnnnnnnnnnnnnnnnnnnnnnnnnnnnnnnnnnnnnnnnnnnnnnnnnnnnnnnnnnnnnnnnnnnnnnnnnnnnnnnnnnnnnnnnnnnnnnnnnnnnnnnnnnnnnnnnnnnnnnnnnnnnnnnnnnnnnnnnnnnnnnnnnnnnnnnnnnnnnnnnnnnnnnnnnnnnnnnnnnnnnnnnnnnnnnnnnnnnnnnnnnnnnnnnnnnnnnnnnnnnnnnnnnnnnnnnnnnnnnnnnnnnnnnnnnnnnnnnnnnnnnnnnnnnnnnnnnnnnnnnnnnnnnnnnnnnnnnnnnnnnnnnnnnnnnnnnnnnnnnnnnnnnnnnnnnnnnnnnnnnnnnnnnnnnnnnnnnnnnnnnnnnnnnnnnnnnnnnnnnnnnnnnnnnnnnnnnnnnnnnnnnnnnnnnnnnnnnnnnnnnnnnnnnnnnnnnnnnnnnnnnnnnnnnnnnnnnnnnnnnnnnnnnnnnnnnnnnnnnnnnnnnnnnnnnnnnnnnnnnnnnnnnnnnnnnnnnnnnnnnnnnnnnnnnnnnnnnnnnnnnnnnnnnnnnnnnnnnnnnnnnnnnnnnnnnnnnnnnnnnnnnnnnnnnnnnnnnnnnnnnnnnnnnnnnnnnnnnnnnnnnnnnnnnnnnnnnnnnnnnnnnnnnnnnnnnnnnnnnnnnnnnnnnnnnnnnnnnnnnnnnnnnnnnnnnnnnnnnnnnnnnnnnnnnnnnnnnnnnnnnnnnnnnnnnnnnnnnnnnnnnnnnnnnnnnnnnnnnnnnnnnnnnnnnnnnnnnnnnnnnnnnnnnnnnnnnnnnnnnnnnnnnnnnnnnnnnnnnnnnnnnnnnnnnnnnnnnnnnnnnnnnnnnnnnnnnnnnnnnnnnnnnnnnnnnnnnnnnnnnnnnnnnnnnnnnnnnnnnnnnnnnnnnnnnnnnnnnnnnnnnnnnnnnnnnnnnnnnnnnnnnnnnnnnnnnnnnnnnnnnnnnnnnnnnnnnnnnnnnnnnnnnnnnnnnnnnnnnnnnnnnnnnnnnnnnnnnnnnnnnnnnnnnnnnnnnnnnnnnnnnnnnnnnnnnnnnnnnnnnnnnnnnnnnnnnnnnnnnnnnnnnnnnnnnnnnnnnnnnnnnnnnnnnnnnnnnnnnnnnnnnnnnnnnnnnnnnnnnnnnnnnnnnnnnnnnnnnnnnnnnnnnnnnnnnnnnnnnnnnnnnnnnnnnnnnnnnnnnnnnnnnnnnnnnnnnnnnnnnnnnnnnnnnnnnnnnnnnnnnnnnnnnnnnnnnnnnnnnnnnnnnnnnnnnnnnnnnnnnnnnnnnnnnnnnnnnnnnnnnnnnnnnnnnnnnnnnnnnnnnnnnnnnnnnnnnnnnnnnnnnnnnnnnnnnnnnnnnnnnnnnnnnnnnnnnnnnnnnnnnnnnnnnnnnnnnnnnnnnnnnnnnnnnnnnnnnnnnnnnnnnnnnnnnnnnnnnnnnnnnnnnnnnnnnnnnnnnnnnnnnnnnnnnnnnnnnnnnnnnnnnnnnnnnnnnnnnnnnnnnnnnnnnnnnnnnnnnnnnnnnnnnnnnnnnnnnnnnnnnnnnnnnnnnnnnnnnnnnnnnnnnnnnnnnnnnnnnnnnnnnnnnnnnnnnnnnnnnnnnnnnnnnnnnnnnnnnnnnnnnnnnnnnnnnnnnnnnnnnnnnnnnnnnnnnnnnnnnnnnnnnnnnnnnnnnnnnnnnnnnnnnnnnnnnnnnnnnnnnnnnnnnnnnnnnnnnnnnnnnnnnnnnnnnnnnnnnnnnnnnnnnnnnnnnnnnnnnnnnnnnnnnnnnnnnnnnnnnnnnnnnnnnnnnnnnnnnnnnnnnnnnnnnnnnnnnnnnnnnnnnnnnnnnnnnnnnnnnnnnnnnnnnnnnnnnnnnnnnnnnnnnnnnnnnnnnnnnnnnnnnnnnnnnnnnnnnnnnnnnnnnnnnnnnnnnnnnnnnnnnnnnnnnnnnnnnnnnnnnnnnnnnnnnnnnnnnnnnnnnnnnnnnnnnnnnnnnnnnnnnnnnnnnnnnnnnnnnnnnnnnnnnnnnnnnnnnnnnnnnnnnnnnnnnnnnnnnnnnnnnnnnnnnnnnnnnnnnnnnnnnnnnnnnnnnnnnnnnnnnnnnnnnnnnnnnnnnnnnnnnnnnnnnnnnnnnnnnnnnnnnnnnnnnnnnnnnnnnnnnnnnnnnnnnnnnnnnnnnnnnnnnnnnnnnnnnnnnnnnnnnnnnnnnnnnnnnnnnnnnnnnnnnnnnnnnnnnnnnnnnnnnnnnnnnnnnnnnnnnnnnnnnnnnnnnnnnnnnnnnnnnnnnnnnnnnnnnnnnnnnnnnnnnnnnnnnnnnnnnnnnnnnnnnnnnnnnnnnnnnnnnnnnnnnnnnnnnnnnnnnnnnnnnnnnnnnnnnnnnnnnnnnnnnnnnnnnnnnnnnnnnnnnnnnnnnnnnnnnnnnnnnnnnnnnnnnnnnnnnnnnnnnnnnnnnnnnnnnnnnnnnnnnnnnnnnnnnnnnnnnnnnnnnnnnnnnnnnnnnnnnnnnnnnnnnnnnnnnnnnnnnnnnnnnnnnnnnnnnnnnnnnnnnnnnnnnnnnnnnnnnnnnnnnnnnnnnnnnnnnnnnnnnnnnnnnnnnnnnnnnnnnnnnnnnnnnnnnnnnnnnnnnnnnnnnnnnnnnnnnnnnnnnnnnnnnnnnnnnnnnnnnnnnnnnnnnnnnnnnnnnnnnnnnnnnnnnnnnnnnnnnnnnnnnnnnnnnnnnnnnnnnnnnnnnnnnnnnnnnnnnnnnnnnnnnnnnnnnnnnnnnnnnnnnnnnnnnnnnnnnnnnnnnnnnnnnnnnnnnnnnnnnnnnnnnnnnnnnnnnnnnnnnnnnnnnnnnnnnnnnnnnnnnnnnnnnnnnnnnnnnnnnnnnnnnnnnnnnnnnnnnnnnnnnnnnnnnnnnnnnnnnnnnnnnnnnnnnnnnnnnnnnnnnnnnnnnnnnnnnnnnnnnnnnnnnnnnnnnnnnnnnnnnnnnnnnnnnnnnnnnnnnnnnnnnnnnnnnnnnnnnnnnnnnnnnnnnnnnnnnnnnnnnnnnnnnnnnnnnnnnnnnnnnnnnnnnnnnnnnnnnnnnnnnnnnnnnnnnnnnnnnnnnnnnnnnnnnnnnnnnnnnnnnnnnnnnnnnnnnnnnnnnnnnnnnnnnnnnnnnnnnnnnnnnnnnnnnnnnnnnnnnnnnnnnnnnnnnnnnnnnnnnnnnnnnnnnnnnnnnnnnnnnnnnnnnnnnnnnnnnnnnnnnnnnnnnnnnnnnnnnnnnnnnnnnnnnnnnnnnnnnnnnnnnnnnnnnnnnnnnnnnnnnnnnnnnnnnnnnnnnnnnnnnnnnnnnnnnnnnnnnnnnnnnnnnnnnnnnnnnnnnnnnnnnnnnnnnnnnnnnnnnnnnnnnnnnnnnnnnnnnnnnnnnnnnnnnnnnnnnnnnnnnnnnnnnnnnnnnnnnnnnnnnnnnnnnnnnnnnnnnnnnnnnnnnnnnnnnnnnnnnnnnnnnnnnnnnnnnnnnnnnnnnnnnnnnnnnnnnnnnnnnnnnnnnnnnnnnnnnnnnnnnnnnnnnnnnnnnnnnnnnnnnnnnnnnnnnnnnnnnnnnnnnnnnnnnnnnnnnnnnnnnnnnnnnnnnnnnnnnnnnnnnnnnnnnnnnnnnnnnnnnnnnnnnnnnnnnnnnnnnnnnnnnnnnnnnnnnnnnnnnnnnnnnnnnnnnnnnnnnnnnnnnnnnnnnnnnnnnnnnnnnnnnnnnnnnnnnnnnnnnnnnnnnnnnnnnnnnnnnnnnnnnnnnnnnnnnnnnnnnnnnnnnnnnnnnnnnnnnnnnnnnnnnnnnnnnnnnnnnnnnnnnnnnnnnnnnnnnnnnnnnnnnnnnnnnnnnnnnnnnnnnnnnnnnnnnnnnnnnnnnnnnnnnnnnnnnnnnnnnnnnnnnnnnnnnnnnnnnnnnnnnnnnnnnnnnnnnnnnnnnnnnnnnnnnnnnnnnnnnnnnnnnnnnnnnnnnnnnnnnnnnnnnnnnnnnnnnnnnnnnnnnnnnnnnnnnnnnnnnnnnnnnnnnnnnnnnnnnnnnnnnnnnnnnnnnnnnnnnnnnnnnnnnnnnnnnnnnnnnnnnnnnnnnnnnnnnnnnnnnnnnnnnnnnnnnnnnnnnnnnnnnnnnnnnnnnnnnnnnnnnnnnnnnnnnnnnnnnnnnnnnnnnnnnnnnnnnnnnnnnnnnnnnnnnnnnnnnnnnnnnnnnnnnnnnnnnnnnnnnnnnnnnnnnnnnnnnnnnnnnnnnnnnnnnnnnnnnnnnnnnnnnnnnnnnnnnnnnnnnnnnnnnnnnnnnnnnnnnnnnnnnnnnnnnnnnnnnnnnnnnnnnnnnnnnnnnnnnnnnnnnnnnnnnnnnnnnnnnnnnnnnnnnnnnnnnnnnnnnnnnnnnnnnnnnnnnnnnnnnnnnnnnnnnnnnnnnnnnnnnnnnnnnnnnnnnnnnnnnnnnnnnnnnnnnnnnnnnnnnnnnnnnnnnnnnnnnnnnnnnnnnnnnnnnnnnnnnnnnnnnnnnnnnnnnnnnnnnnnnnnnnnnnnnnnnnnnnnnnnnnnnnnnnnnnnnnnnnnnnnnnnnnnnnnnnnnnnnnnnnnnnnnnnnnnnnnnnnnnnnnnnnnnnnnnnnnnnnnnnnnnnnnnnnnnnnnnnnnnnnnnnnnnnnnnnnnnnnnnnnnnnnnnnnnnnnnnnnnnnnnnnnnnnnnnnnnnnnnnnnnnnnnnnnnnnnnnnnnnnnnnnnnnnnnnnnnnnnnnnnnnnnnnnnnnnnnnnnnnnnnnnnnnnnnnnnnnnnnnnnnnnnnnnnnnnnnnnnnnnnnnnnnnnnnnnnnnnnnnnnnnnnnnnnnnnnnnnnnnnnnnnnnnnnnnnnnnnnnnnnnnnnnnnnnnnnnnnnnnnnnnnnnnnnnnnnnnnnnnnnnnnnnnnnnnnnnnnnnnnnnnnnnnnnnnnnnnnnnnnnnnnnnnnnnnnnnnnnnnnnnnnnnnnnnnnnnnnnnnnnnnnnnnnnnnnnnnnnnnnnnnnnnnnnnnnnnnnnnnnnnnnnnnnnnnnnnnnnnnnnnnnnnnnnnnnnnnnnnnnnnnnnnnnnnnnnnnnnnnnnnnnnnnnnnnnnnnnnnnnnnnnnnnnnnnnnnnnnnnnnnnnnnnnnnnnnnnnnnnnnnnnnnnnnnnnnnnnnnnnnnnnnnnnnnnnnnnnnnnnnnnnnnnnnnnnnnnnnnnnnnnnnnnnnnnnnnnnnnnnnnnnnnnnnnnnnnnnnnnnnnnnnnnnnnnnnnnnnnnnnnnnnnnnnnnnnnnnnnnnnnnnnnnnnnnnnnnnnnnnnnnnnnnnnnnnnnnnnnnnnnnnnnnnnnnnnnnnnnnnnnnnnnnnnnnnnnnnnnnnnnnnnnnnnnnnnnnnnnnnnnnnnnnnnnnnnnnnnnnnnnnnnnnnnnnnnnnnnnnnnnnnnnnnnnnnnnnnnnnnnnnnnnnnnnnnnnnnnnnnnnnnnnnnnnnnnnnnnnnnnnnnnnnnnnnnnnnnnnnnnnnnnnnnnnnnnnnnnnnnnnnnnnnnnnnnnnnnnnnnnnnnnnnnnnnnnnnnnnnnnnnnnnnnnnnnnnnnnnnnnnnnnnnnnnnnnnnnnnnnnnnnnnnnnnnnnnnnnnnnnnnnnnnnnnnnnnnnnnnnnnnnnnnnnnnnnnnnnnnnnnnnnnnnnnnnnnnnnnnnnnnnnnnnnnnnnnnnnnnnnnnnnnnnnnnnnnnnnnnnnnnnnnnnnnnnnnnnnnnnnnnnnnnnnnnnnnnnnnnnnnnnnnnnnnnnnnnnnnnnnnnnnnnnnnnnnnnnnnnnnnnnnnnnnnnnnnnnnnnnnnnnnnnnnnnnnnnnnnnnnnnnnnnnnnnnnnnnnnnnnnnnnnnnnnnnnnnnnnnnnnnnnnnnnnnnnnnnnnnnnnnnnnnnnnnnnnnnnnnnnnnnnnnnnnnnnnnnnnnnnnnnnnnnnnnnnnnnnnnnnnnnnnnnnnnnnnnnnnnnnnnnnnnnnnnnnnnnnnnnnnnnnnnnnnnnnnnnnnnnnnnnnnnnnnnnnnnnnnnnnnnnnnnnnnnnnnnnnnnnnnnnnnnnnnnnnnnnnnnnnnnnnnnnnnnnnnnnnnnnnnnnnnnnnnnnnnnnnnnnnnnnnnnnnnnnnnnnnnnnnnnnnnnnnnnnnnnnnnnnnnnnnnnnnnnnnnnnnnnnnnnnnnnnnnnnnnnnnnnnnnnnnnnnnnnnnnnnnnnnnnnnnnnnnnnnnnnnnnnnnnnnnnnnnnnnnnnnnnnnnnnnnnnnnnnnnnnnnnnnnnnnnnnnnnnnnnnnnnnnnnnnnnnnnnnnnnnnnnnnnnnnnnnnnnnnnnnnnnnnnnnnnnnnnnnnnnnnnnnnnnnnnnnnnnnnnnnnnnnnnnnnnnnnnnnnnnnnnnnnnnnnnnnnnnnnnnnnnnnnnnnnnnnnnnnnnnnnnnnnnnnnnnnnnnnnnnnnnnnnnnnnnnnnnnnnnnnnnnnnnnnnnnnnnnnnnnnnnnnnnnnnnnnnnnnnnnnnnnnnnnnnnnnnnnnnnnnnnnnnnnnnnnnnnnnnnnnnnnnnnnnnnnnnnnnnnnnnnnnnnnnnnnnnnnnnnnnnnnnnnnnnnnnnnnnnnnnnnnnnnnnnnnnnnnnnnnnnnnnnnnnnnnnnnnnnnnnnnnnnnnnnnnnnnnnnnnnnnnnnnnnnnnnnnnnnnnnnnnnnnnnnnnnnnnnnnnnnnnnnnnnnnnnnnnnnnnnnnnnnnnnnnnnnnnnnnnnnnnnnnnnnnnnnnnnnnnnnnnnnnnnnnnnnnnnnnnnnnnnnnnnnnnnnnnnnnnnnnnnnnnnnnnnnnnnnnnnnnnnnnnnnnnnnnnnnnnnnnnnnnnnnnnnnnnnnnnnnnnnnnnnnnnnnnnnnnnnnnnnnnnnnnnnnnnnnnnnnnnnnnnnnnnnnnnnnnnnnnnnnnnnnnnnnnnnnnnnnnnnnnnnnnnnnnnnnnnnnnnnnnnnnnnnnnnnnnnnnnnnnnnnnnnnnnnnnnnnnnnnnnnnnnnnnnnnnnnnnnnnnnnnnnnnnnnnnnnnnnnnnnnnnnnnnnnnnnnnnnnnnnnnnnnnnnnnnnnnnnnnnnnnnnnnnnnnnnnnnnnnnnnnnnnnnnnnnnnnnnnnnnnnnnnnnnnnnnnnnnnnnnnnnnnnnnnnnnnnnnnnnnnnnnnnnnnnnnnnnnnnnnnnnnnnnnnnnnnnnnnnnnnnnnnnnnnnnnnnnnnnnnnnnnnnnnnnnnnnnnnnnnnnnnnnnnnnnnnnnnnnnnnnnnnnnnnnnnnnnnnnnnnnnnnnnnnnnnnnnnnnnnnnnnnnnnnnnnnnnnnnnnnnnnnnnnnnnnnnnnnnnnnnnnnnnnnnnnnnnnnnnnnnnnnnnnnnnnnnnnnnnnnnnnnnnnnnnnnnnnnnnnnnnnnnnnnnnnnnnnnnnnnnnnnnnnnnnnnnnnnnnnnnnnnnnnnnnnnnnnnnnnnnnnnnnnnnnnnnnnnnnnnnnnnnnnnnnnnnnnnnnnnnnnnnnnnnnnnnnnnnnnnnnnnnnnnnnnnnnnnnnnnnnnnnnnnnnnnnnnnnnnnnnnnnnnnnnnnnnnnnnnnnnnnnnnnnnnnnnnnnnnnnnnnnnnnnnnnnnnnnnnnnnnnnnnnnnnnnnnnnnnnnnnnnnnnnnnnnnnnnnnnnnnnnnnnnnnnnnnnnnnnnnnnnnnnnnnnnnnnnnnnnnnnnnnnnnnnnnnnnnnnnnnnnnnnnnnnnnnnnnnnnnnnnnnnnnnnnnnnnnnnnnnnnnnnnnnnnnnnnnnnnnnnnnnnnnnnnnnnnnnnnnnnnnnnnnnnnnnnnnnnnnnnnnnnnnnnnnnnnnnnnnnnnnnnnnnnnnnnnnnnnnnnnnnnnnnnnnnnnnnnnnnnnnnnnnnnnnnnnnnnnnnnnnnnnnnnnnnnnnnnnnnnnnnnnnnnnnnnnnnnnnnnnnnnnnnnnnnnnnnnnnnnnnnnnnnnnnnnnnnnnnnnnnnnnnnnnnnnnnnnnnnnnnnnnnnnnnnnnnnnnnnnnnnnnnnnnnnnnnnnnnnnnnnnnnnnnnnnnnnnnnnnnnnnnnnnnnnnnnnnnnnnnnnnnnnnnnnnnnnnnnnnnnnnnnnnnnnnnnnnnnnnnnnnnnnnnnnnnnnnnnnnnnnnnnnnnnnnnnnnnnnnnnnnnnnnnnnnnnnnnnnnnnnnnnnnnnnnnnnnnnnnnnnnnnnnnnnnnnnnnnnnnnnnnnnnnnnnnnnnnnnnnnnnnnnnnnnnnnnnnnnnnnnnnnnnnnnnnnnnnnnnnnnnnnnnnnnnnnnnnnnnnnnnnnnnnnnnnnnnnnnnnnnnnnnnnnnnnnnnnnnnnnnnnnnnnnnnnnnnnnnnnnnnnnnnnnnnnnnnnnnnnnnnnnnnnnnnnnnnnnnnnnnnnnnnnnnnnnnnnnnnnnnnnnnnnnnnnnnnnnnnnnnnnnnnnnnnnnnnnnnnnnnnnnnnnnnnnnnnnnnnnnnnnnnnnnnnnnnnnnnnnnnnnnnnnnnnnnnnnnnnnnnnnnnnnnnnnnnnnnnnnnnnnnnnnnnnnnnnnnnnnnnnnnnnnnnnnnnnnnnnnnnnnnnnnnnnnnnnnnnnnnnnnnnnnnnnnnnnnnnnnnnnnnnnnnnnnnnnnnnnnnnnnnnnnnnnnnnnnnnnnnnnnnnnnnnnnnnnnnnnnnnnnnnnnnnnnnnnnnnnnnnnnnnnnnnnnnnnnnnnnnnnnnnnnnnnnnnnnnnnnnnnnnnnnnnnnnnnnnnnnnnnnnnnnnnnnnnnnnnnnnnnnnnnnnnnnnnnnnnnnnnnnnnnnnnnnnnnnnnnnnnnnnnnnnnnnnnnnnnnnnnnnnnnnnnnnnnnnnnnnnnnnnnnnnnnnnnnnnnnnnnnnnnnnnnnnnnnnnnnnnnnnnnnnnnnnnnnnnnnnnnnnnnnnnnnnnnnnnnnnnnnnnnnnnnnnnnnnnnnnnnnnnnnnnnnnnnnnnnnnnnnnnnnnnnnnnnnnnnnnnnnnnnnnnnnnnnnnnnnnnnnnnnnnnnnnnnnnnnnnnnnnnnnnnnnnnnnnnnnnnnnnnnnnnnnnnnnnnnnnnnnnnnnnnnnnnnnnnnnnnnnnnnnnnnnnnnnnnnnnnnnnnnnnnnnnnnnnnnnnnnnnnnnnnnnnnnnnnnnnnnnnnnnnnnnnnnnnnnnnnnnnnnnnnnnnnnnnnnnnnnnnnnnnnnnnnnnnnnnnnnnnnnnnnnnnnnnnnnnnnnnnnnnnnnnnnnnnnnnnnnnnnnnnnnnnnnnnnnnnnnnnnnnnnnnnnnnnnnnnnnnnnnnnnnnnnnnnnnnnnnnnnnnnnnnnnnnnnnnnnnnnnnnnnnnnnnnnnnnnnnnnnnnnnnnnnnnnnnnnnnnnnnnnnnnnnnnnnnnnnnnnnnnnnnnnnnnnnnnnnnnnnnnnnnnnnnnnnnnnnnnnnnnnnnnnnnnnnnnnnnnnnnnnnnnnnnnnnnnnnnnnnnnnnnnnnnnnnnnnnnnnnnnnnnnnnnnnnnnnnnnnnnnnnnnnnnnnnnnnnnnnnnnnnnnnnnnnnnnnnnnnnnnnnnnnnnnnnnnnnnnnnnnnnnnnnnnnnnnnnnnnnnnnnnnnnnnnnnnnnnnnnnnnnnnnnnnnnnnnnnnnnnnnnnnnnnnnnnnnnnnnnnnnnnnnnnnnnnnnnnnnnnnnnnnnnnnnnnnnnnnnnnnnnnnnnnnnnnnnnnnnnnnnnnnnnnnnnnnnnnnnnnnnnnnnnnnnnnnnnnnnnnnnnnnnnnnnnnnnnnnnnnnnnnnnnnnnnnnnnnnnnnnnnnnnnnnnnnnnnnnnnnnnnnnnnnnnnnnnnnnnnnnnnnnnnnnnnnnnnnnnnnnnnnnnnnnnnnnnnnnnnnnnnnnnnnnnnnnnnnnnnnnnnnnnnnnnnnnnnnnnnnnnnnnnnnnnnnnnnnnnnnnnnnnnnnnnnnnnnnnnnnnnnnnnnnnnnnnnnnnnnnnnnnnnnnnnnnnnnnnnnnnnnnnnnnnnnnnnnnnnnnnnnnnnnnnnnnnnnnnnnnnnnnnnnnnnnnnnnnnnnnnnnnnnnnnnnnnnnnnnnnnnnnnnnnnnnnnnnnnnnnnnnnnnnnnnnnnnnnnnnnnnnnnnnnnnnnnnnnnnnnnnnnnnnnnnnnnnnnnnnnnnnnnnnnnnnnnnnnnnnnnnnnnnnnnnnnnnnnnnnnnnnnnnnnnnnnnnnnnnnnnnnnnnnnnnnnnnnnnnnnnnnnnnnnnnnnnnnnnnnnnnnnnnnnnnnnnnnnnnnnnnnnnnnnnnnnnnnnnnnnnnnnnnnnnnnnnnnnnnnnnnnnnnnnnnnnnnnnnnnnnnnnnnnnnnnnnnnnnnnnnnnnnnnnnnnnnnnnnnnnnnnnnnnnnnnnnnnnnnnnnnnnnnnnnnnnnnnnnnnnnnnnnnnnnnnnnnnnnnnnnnnnnnnnnnnnnnnnnnnnnnnnnnnnnnnnnnnnnnnnnnnnnnnnnnnnnnnnnnnnnnnnnnnnnnnnnnnnnnnnnnnnnnnnnnnnnnnnnnnnnnnnnnnnnnnnnnnnnnnnnnnnnnnnnnnnnnnnnnnnnnnnnnnnnnnnnnnnnnnnnnnnnnnnnnnnnnnnnnnnnnnnnnnnnnnnnnnnnnnnnnnnnnnnnnnnnnnnnnnnnnnnnnnnnnnnnnnnnnnnnnnnnnnnnnnnnnnnnnnnnnnnnnnnnnnnnnnnnnnnnnnnnnnnnnnnnnnnnnnnnnnnnnnnnnnnnnnnnnnnnnnnnnnnnnnnnnnnnnnnnnnnnnnnnnnnnnnnnnnnnnnnnnnnnnnnnnnnnnnnnnnnnnnnnnnnnnnnnnnnnnnnnnnnnnnnnnnnnnnnnnnnnnnnnnnnnnnnnnnnnnnnnnnnnnnnnnnnnnnnnnnnnnnnnnnnnnnnnnnnnnnnnnnnnnnnnnnnnnnnnnnnnnnnnnnnnnnnnnnnnnnnnnnnnnnnnnnnnnnnnnnnnnnnnnnnnnnnnnnnnnnnnnnnnnnnnnnnnnnnnnnnnnnnnnnnnnnnnnnnnnnnnnnnnnnnnnnnnnnnnnnnnnnnnnnnnnnnnnnnnnnnnnnnnnnnnnnnnnnnnnnnnnnnnnnnnnnnnnnnnnnnnnnnnnnnnnnnnnnnnnnnnnnnnnnnnnnnnnnnnnnnnnnnnnnnnnnnnnnnnnnnnnnnnnnnnnnnnnnnnnnnnnnnnnnnnnnnnnnnnnnnnnnnnnnnnnnnnnnnnnnnnnnnnnnnnnnnnnnnnnnnnnnnnnnnnnnnnnnnnnnnnnnnnnnnnnnnnnnnnnnnnnnnnnnnnnnnnnnnnnnnnnnnnnnnnnnnnnnnnnnnnnnnnnnnnnnnnnnnnnnnnnnnnnnnnnnnnnnnnnnnnnnnnnnnnnnnnnnnnnnnnnnnnnnnnnnnnnnnnnnnnnnnnnnnnnnnnnnnnnnnnnnnnnnnnnnnnnnnnnnnnnnnnnnnnnnnnnnnnnnnnnnnnnnnnnnnnnnnnnnnnnnnnnnnnnnnnnnnnnnnnnnnnnnnnnnnnnnnnnnnnnnnnnnnnnnnnnnnnnnnnnnnnnnnnnnnnnnnnnnnnnnnnnnnnnnnnnnnnnnnnnnnnnnnnnnnnnnnnnnnnnnnnnnnnnnnnnnnnnnnnnnnnnnnnnnnnnnnnnnnnnnnnnnnnnnnnnnnnnnnnnnnnnnnnnnnnnnnnnnnnnnnnnnnnnnnnnnnnnnnnnnnnnnnnnnnnnnnnnnnnnnnnnnnnnnnnnnnnnnnnnnnnnnnnnnnnnnnnnnnnnnnnnnnnnnnnnnnnnnnnnnnnnnnnnnnnnnnnnnnnnnnnnnnnnnnnnnnnnnnnnnnnnnnnnnnnnnnnnnnnnnnnnnnnnnnnnnnnnnnnnnnnnnnnnnnnnnnnnnnnnnnnnnnnnnnnnnnnnnnnnnnnnnnnnnnnnnnnnnnnnnnnnnnnnnnnnnnnnnnnnnnnnnnnnnnnnnnnnnnnnnnnnnnnnnnnnnnnnnnnnnnnnnnnnnnnnnnnnnnnnnnnnnnnnnnnnnnnnnnnnnnnnnnnnnnnnnnnnnnnnnnnnnnnnnnnnnnnnnnnnnnnnnnnnnnnnnnnnnnnnnnnnnnnnnnnnnnnnnnnnnnnnnnnnnnnnnnnnnnnnnnnnnnnnnnnnnnnnnnnnnnnnnnnnnnnnnnnnnnnnnnnnnnnnnnnnnnnnnnnnnnnnnnnnnnnnnnnnnnnnnnnnnnnnnnnnnnnnnnnnnnnnnnnnnnnnnnnnnnnnnnnnnnnnnnnnnnnnnnnnnnnnnnnnnnnnnnnnnnnnnnnnnnnnnnnnnnnnnnnnnnnnnnnnnnnnnnnnnnnnnnnnnnnnnnnnnnnnnnnnnnnnnnnnnnnnnnnnnnnnnnnnnnnnnnnnnnnnnnnnnnnnnnnnnnnnnnnnnnnnnnnnnnnnnnnnnnnnnnnnnnnnnnnnnnnnnnnnnnnnnnnnnnnnnnnnnnnnnnnnnnnnnnnnnnnnnnnnnnnnnnnnnnnnnnnnnnnnnnnnnnnnnnnnnnnnnnnnnnnnnnnnnnnnnnnnnnnnnnnnnnnnnnnnnnnnnnnnnnnnnnnnnnnnnnnnnnnnnnnnnnnnnnnnnnnnnnnnnnnnnnnnnnnnnnnnnnnnnnnnnnnnnnnnnnnnnnnnnnnnnnnnnnnnnnnnnnnnnnnnnnnnnnnnnnnnnnnnnnnnnnnnnnnnnnnnnnnnnnnnnnnnnnnnnnnnnnnnnnnnnnnnnnnnnnnnnnnnnnnnnnnnnnnnnnnnnnnnnnnnnnnnnnnnnnnnnnnnnnnnnnnnnnnnnnnnnnnnnnnnnnnnnnnnnnnnnnnnnnnnnnnnnnnnnnnnnnnnnnnnnnnnnnnnnnnnnnnnnnnnnnnnnnnnnnnnnnnnnnnnnnnnnnnnnnnnnnnnnnnnnnnnnnnnnnnnnnnnnnnnnnnnnnnnnnnnnnnnnnnnnnnnnnnnnnnnnnnnnnnnnnnnnnnnnnnnnnnnnnnnnnnnnnnnnnnnnnnnnnnnnnnnnnnnnnnnnnnnnnnnnnnnnnnnnnnnnnnnnnnnnnnnnnnnnnnnnnnnnnnnnnnnnnnnnnnnnnnnnnnnnnnnnnnnnnnnnnnnnnnnnnnnnnnnnnnnnnnnnnnnnnnnnnnnnnnnnnnnnnnnnnnnnnnnnnnnnnnnnnnnnnnnnnnnnnnnnnnnnnnnnnnnnnnnnnnnnnnnnnnnnnnnnnnnnnnnnnnnnnnnnnnnnnnnnnnnnnnnnnnnnnnnnnnnnnnnnnnnnnnnnnnnnnnnnnnnnnnnnnnnnnnnnnnnnnnnnnnnnnnnnnnnnnnnnnnnnnnnnnnnnnnnnnnnnnnnnnnnnnnnnnnnnnnnnnnnnnnnnnnnnnnnnnnnnnnnnnnnnnnnnnnnnnnnnnnnnnnnnnnnnnnnnnnnnnnnnnnnnnnnnnnnnnnnnnnnnnnnnnnnnnnnnnnnnnnnnnnnnnnnnnnnnnnnnnnnnnnnnnnnnnnnnnnnnnnnnnnnnnnnnnnnnnnnnnnnnnnnnnnnnnnnnnnnnnnnnnnnnnnnnnnnnnnnnnnnnnnnnnnnnnnnnnnnnnnnnnnnnnnnnnnnnnnnnnnnnnnnnnnnnnnnnnnnnnnnnnnnnnnnnnnnnnnnnnnnnnnnnnnnnnnnnnnnnnnnnnnnnnnnnnnnnnnnnnnnnnnnnnnnnnnnnnnnnnnnnnnnnnnnnnnnnnnnnnnnnnnnnnnnnnnnnnnnnnnnnnnnnnnnnnnnnnnnnnnnnnnnnnnnnnnnnnnnnnnnnnnnnnnnnnnnnnnnnnnnnnnnnnnnnnnnnnnnnnnnnnnnnnnnnnnnnnnnnnnnnnnnnnnnnnnnnnnnnnnnnnnnnnnnnnnnnnnnnnnnnnnnnnnnnnnnnnnnnnnnnnnnnnnnnnnnnnnnnnnnnnnnnnnnnnnnnnnnnnnnnnnnnnnnnnnnnnnnnnnnnnnnnnnnnnnnnnnnnnnnnnnnnnnnnnnnnnnnnnnnnnnnnnnnnnnnnnnnnnnnnnnnnnnnnnnnnnnnnnnnnnnnnnnnnnnnnnnnnnnnnnnnnnnnnnnnnnnnnnnnnnnnnnnnnnnnnnnnnnnnnnnnnnnnnnnnnnnnnnnnnnnnnnnnnnnnnnnnnnnnnnnnnnnnnnnnnnnnnnnnnnnnnnnnnnnnnnnnnnnnnnnnnnnnnnnnnnnnnnnnnnnnnnnnnnnnnnnnnnnnnnnnnnnnnnnnnnnnnnnnnnnnnnnnnnnnnnnnnnnnnnnnnnnnnnnnnnnnnnnnnnnnnnnnnnnnnnnnnnnnnnnnnnnnnnnnnnnnnnnnnnnnnnnnnnnnnnnnnnnnnnnnnnnnnnnnnnnnnnnnnnnnnnnnnnnnnnnnnnnnnnnnnnnnnnnnnnnnnnnnnnnnnnnnnnnnnnnnnnnnnnnnnnnnnnnnnnnnnnnnnnnnnnnnnnnnnnnnnnnnnnnnnnnnnnnnnnnnnnnnnnnnnnnnnnnnnnnnnnnnnnnnnnnnnnnnnnnnnnnnnnnnnnnnnnnnnnnnnnnnnnnnnnnnnnnnnnnnnnnnnnnnnnnnnnnnnnnnnnnnnnnnnnnnnnnnnnnnnnnnnnnnnnnnnnnnnnnnnnnnnnnnnnnnnnnnnnnnnnnnnnnnnnnnnnnnnnnnnnnnnnnnnnnnnnnnnnnnnnnnnnnnnnnnnnnnnnnnnnnnnnnnnnnnnnnnnnnnnnnnnnnnnnnnnnnnnnnnnnnnnnnnnnnnnnnnnnnnnnnnnnnnnnnnnnnnnnnnnnnnnnnnnnnnnnnnnnnnnnnnnnnnnnnnnnnnnnnnnnnnnnnnnnnnnnnnnnnnnnnnnnnnnnnnnnnnnnnnnnnnnnnnnnnnnnnnnnnnnnnnnnnnnnnnnnnnnnnnnnnnnnnnnnnnnnnnnnnnnnnnnnnnnnnnnnnnnnnnnnnnnnnnnnnnnnnnnnnnnnnnnnnnnnnnnnnnnnnnnnnnnnnnnnnnnnnnnnnnnnnnnnnnnnnnnnnnnnnnnnnnnnnnnnnnnnnnnnnnnnnnnnnnnnnnnnnnnnnnnnnnnnnnnnnnnnnnnnnnnnnnnnnnnnnnnnnnnnnnnnnnnnnnnnnnnnnnnnnnnnnnnnnnnnnnnnnnnnnnnnnnnnnnnnnnnnnnnnnnnnnnnnnnnnnnnnnnnnnnnnnnnnnnnnnnnnnnnnnnnnnnnnnnnnnnnnnnnnnnnnnnnnnnnnnnnnnnnnnnnnnnnnnnnnnnnnnnnnnnnnnnnnnnnnnnnnnnnnnnnnnnnnnnnnnnnnnnnnnnnnnnnnnnnnnnnnnnnnnnnnnnnnnnnnnnnnnnnnnnnnnnnnnnnnnnnnnnnnnnnnnnnnnnnnnnnnnnnnnnnnnnnnnnnnnnnnnnnnnnnnnnnnnnnnnnnnnnnnnnnnnnnnnnnnnnnnnnnnnnnnnnnnnnnnnnnnnnnnnnnnnnnnnnnnnnnnnnnnnnnnnnnnnnnnnnnnnnnnnnnnnnnnnnnnnnnnnnnnnnnnnnnnnnnnnnnnnnnnnnnnnnnnnnnnnnnnnnnnnnnnnnnnnnnnnnnnnnnnnnnnnnnnnnnnnnnnnnnnnnnnnnnnnnnnnnnnnnnnnnnnnnnnnnnnnnnnnnnnnnnnnnnnnnnnnnnnnnnnnnnnnnnnnnnnnnnnnnnnnnnnnnnnnnnnnnnnnnnnnnnnnnnnnnnnnnnnnnnnnnnnnnnnnnnnnnnnnnnnnnnnnnnnnnnnnnnnnnnnnnnnnnnnnnnnnnnnnnnnnnnnnnnnnnnnnnnnnnnnnnnnnnnnnnnnnnnnnnnnnnnnnnnnnnnnnnnnnnnnnnnnnnnnnnnnnnnnnnnnnnnnnnnnnnnnnnnnnnnnnnnnnnnnnnnnnnnnnnnnnnnnnnnnnnnnnnnnnnnnnnnnnnnnnnnnnnnnnnnnnnnnnnnnnnnnnnnnnnnnnnnnnnnnnnnnnnnnnnnnnnnnnnnnnnnnnnnnnnnnnnnnnnnnnnnnnnnnnnnnnnnnnnnnnnnnnnnnnnnnnnnnnnnnnnnnnnnnnnnnnnnnnnnnnnnnnnnnnnnnnnnnnnnnnnnnnnnnnnnnnnnnnnnnnnnnnnnnnnnnnnnnnnnnnnnnnnnnnnnnnnnnnnnnnnnnnnnnnnnnnnnnnnnnnnnnnnnnnnnnnnnnnnnnnnnnnnnnnnnnnnnnnnnnnnnnnnnnnnnnnnnnnnnnnnnnnnnnnnnnnnnnnnnnnnnnnnnnnnnnnnnnnnnnnnnnnnnnnnnnnnnnnnnnnnnnnnnnnnnnnnnnnnnnnnnnnnnnnnnnnnnnnnnnnnnnnnnnnnnnnnnnnnnnnnnnnnnnnnnnnnnnnnnnnnnnnnnnnnnnnnnnnnnnnnnnnnnnnnnnnnnnnnnnnnnnnnnnnnnnnnnnnnnnnnnnnnnnnnnnnnnnnnnnnnnnnnnnnnnnnnnnnnnnnnnnnnnnnnnnnnnnnnnnnnnnnnnnnnnnnnnnnnnnnnnnnnnnnnnnnnnnnnnnnnnnnnnnnnnnnnnnnnnnnnnnnnnnnnnnnnnnnnnnnnnnnnnnnnnnnnnnnnnnnnnnnnnnnnnnnnnnnnnnnnnnnnnnnnnnnnnnnnnnnnnnnnnnnnnnnnnnnnnnnnnnnnnnnnnnnnnnnnnnnnnnnnnnnnnnnnnnnnnnnnnnnnnnnnnnnnnnnnnnnnnnnnnnnnnnnnnnnnnnnnnnnnnnnnnnnnnnnnnnnnnnnnnnnnnnnnnnnnnnnnnnnnnnnnnnnnnnnnnnnnnnnnnnnnnnnnnnnnnnnnnnnnnnnnnnnnnnnnnnnnnnnnnnnnnnnnnnnnnnnnnnnnnnnnnnnnnnnnnnnnnnnnnnnnnnnnnnnnnnnnnnnnnnnnnnnnnnnnnnnnnnnnnnnnnnnnnnnnnnnnnnnnnnnnnnnnnnnnnnnnnnnnnnnnnnnnnnnnnnnnnnnnnnnnnnnnnnnnnnnnnnnnnnnnnnnnnnnnnnnnnnnnnnnnnnnnnnnnnnnnnnnnnnnnnnnnnnnnnnnnnnnnnnnnnnnnnnnnnnnnnnnnnnnnnnnnnnnnnnnnnnnnnnnnnnnnnnnnnnnnnnnnnnnnnnnnnnnnnnnnnnnnnnnnnnnnnnnnnnnnnnnnnnnnnnnnnnnnnnnnnnnnnnnnnnnnnnnnnnnnnnnnnnnnnnnnnnnnnnnnnnnnnnnnnnnnnnnnnnnnnnnnnnnnnnnnnnnnnnnnnnnnnnnnnnnnnnnnnnnnnnnnnnnnnnnnnnnnnnnnnnnnnnnnnnnnnnnnnnnnnnnnnnnnnnnnnnnnnnnnnnnnnnnnnnnnnnnnnnnnnnnnnnnnnnnnnnnnnnnnnnnnnnnnnnnnnnnnnnnnnnnnnnnnnnnnnnnnnnnnnnnnnnnnnnnnnnnnnnnnnnnnnnnnnnnnnnnnnnnnnnnnnnnnnnnnnnnnnnnnnnnnnnnnnnnnnnnnnnnnnnnnnnnnnnnnnnnnnnnnnnnnnnnnnnnnnnnnnnnnnnnnnnnnnnnnnnnnnnnnnnnnnnnnnnnnnnnnnnnnnnnnnnnnnnnnnnnnnnnnnnnnnnnnnnnnnnnnnnnnnnnnnnnnnnnnnnnnnnnnnnnnnnnnnnnnnnnnnnnnnnnnnnnnnnnnnnnnnnnnnnnnnnnnnnnnnnnnnnnnnnnnnnnnnnnnnnnnnnnnnnnnnnnnnnnnnnnnnnnnnnnnnnnnnnnnnnnnnnnnnnnnnnnnnnnnnnnnnnnnnnnnnnnnnnnnnnnnnnnnnnnnnnnnnnnnnnnnnnnnnnnnnnnnnnnnnnnnnnnnnnnnnnnnnnnnnnnnnnnnnnnnnnnnnnnnnnnnnnnnnnnnnnnnnnnnnnnnnnnnnnnnnnnnnnnnnnnnnnnnnnnnnnnnnnnnnnnnnnnnnnnnnnnnnnnnnnnnnnnnnnnnnnnnnnnnnnnnnnnnnnnnnnnnnnnnnnnnnnnnnnnnnnnnnnnnnnnnnnnnnnnnnnnnnnnnnnnnnnnnnnnnnnnnnnnnnnnnnnnnnnnnnnnnnnnnnnnnnnnnnnnnnnnnnnnnnnnnnnnnnnnnnnnnnnnnnnnnnnnnnnnnnnnnnnnnnnnnnnnnnnnnnnnnnnnnnnnnnnnnnnnnnnnnnnnnnnnnnnnnnnnnnnnnnnnnnnnnnnnnnnnnnnnnnnnnnnnnnnnnnnnnnnnnnnnnnnnnnnnnnnnnnnnnnnnnnnnnnnnnnnnnnnnnnnnnnnnnnnnnnnnnnnnnnnnnnnnnnnnnnnnnnnnnnnnnnnnnnnnnnnnnnnnnnnnnnnnnnnnnnnnnnnnnnnnnnnnnnnnnnnnnnnnnnnnnnnnnnnnnnnnnnnnnnnnnnnnnnnnnnnnnnnnnnnnnnnnnnnnnnnnnnnnnnnnnnnnnnnnnnnnnnnnnnnnnnnnnnnnnnnnnnnnnnnnnnnnnnnnnnnnnnnnnnnnnnnnnnnnnnnnnnnnnnnnnnnnnnnnnnnnnnnnnnnnnnnnnnnnnnnnnnnnnnnnnnnnnnnnnnnnnnnnnnnnnnnnnnnnnnnnnnnnnnnnnnnnnnnnnnnnnnnnnnnnnnnnnnnnnnnnnnnnnnnnnnnnnnnnnnnnnnnnnnnnnnnnnnnnnnnnnnnnnnnnnnnnnnnnnnnnnnnnnnnnnnnnnnnnnnnnnnnnnnnnnnnnnnnnnnnnnnnnnnnnnnnnnnnnnnnnnnnnnnnnnnnnnnnnnnnnnnnnnnnnnnnnnnnnnnnnnnnnnnnnnnnnnnnnnnnnnnnnnnnnnnnnnnnnnnnnnnnnnnnnnnnnnnnnnnnnnnnnnnnnnnnnnnnnnnnnnnnnnnnnnnnnnnnnnnnnnnnnnnnnnnnnnnnnnnnnnnnnnnnnnnnnnnnnnnnnnnnnnnnnnnnnnnnnnnnnnnnnnnnnnnnnnnnnnnnnnnnnnnnnnnnnnnnnnnnnnnnnnnnnnnnnnnnnnnnnnnnnnnnnnnnnnnnnnnnnnnnnnnnnnnnnnnnnnnnnnnnnnnnnnnnnnnnnnnnnnnnnnnnnnnnnnnnnnnnnnnnnnnnnnnnnnnnnnnnnnnnnnnnnnnnnnnnnnnnnnnnnnnnnnnnnnnnnnnnnnnnnnnnnnnnnnnnnnnnnnnnnnnnnnnnnnnnnnnnnnnnnnnnnnnnnnnnnnnnnnnnnnnnnnnnnnnnnnnnnnnnnnnnnnnnnnnnnnnnnnnnnnnnnnnnnnnnnnnnnnnnnnnnnnnnnnnnnnnnnnnnnnnnnnnnnnnnnnnnnnnnnnnnnnnnnnnnnnnnnnnnnnnnnnnnnnnnnnnnnnnnnnnnnnnnnnnnnnnnnnnnnnnnnnnnnnnnnnnnnnnnnnnnnnnnnnnnnnnnnnnnnnnnnnnnnnnnnnnnnnnnnnnnnnnnnnnnnnnnnnnnnnnnnnnnnnnnnnnnnnnnnnnnnnnnnnnnnnnnnnnnnnnnnnnnnnnnnnnnnnnnnnnnnnnnnnnnnnnnnnnnnnnnnnnnnnnnnnnnnnnnnnnnnnnnnnnnnnnnnnnnnnnnnnnnnnnnnnnnnnnnnnnnnnnnnnnnnnnnnnnnnnnnnnnnnnnnnnnnnnnnnnnnnnnnnnnnnnnnnnnnnnnnnnnnnnnnnnnnnnnnnnnnnnnnnnnnnnnnnnnnnnnnnnnnnnnnnnnnnnnnnnnnnnnnnnnnnnnnnnnnnnnnnnnnnnnnnnnnnnnnnnnnnnnnnnnnnnnnnnnnnnnnnnnnnnnnnnnnnnnnnnnnnnnnnnnnnnnnnnnnnnnnnnnnnnnnnnnnnnnnnnnnnnnnnnnnnnnnnnnnnnnnnnnnnnnnnnnnnnnnnnnnnnnnnnnnnnnnnnnnnnnnnnnnnnnnnnnnnnnnnnnnnnnnnnnnnnnnnnnnnnnnnnnnnnnnnnnnnnnnnnnnnnnnnnnnnnnnnnnnnnnnnnnnnnnnnnnnnnnnnnnnnnnnnnnnnnnnnnnnnnnnnnnnnnnnnnnnnnnnnnnnnnnnnnnnnnnnnnnnnnnnnnnnnnnnnnnnnnnnnnnnnnnnnnnnnnnnnnnnnnnnnnnnnnnnnnnnnnnnnnnnnnnnnnnnnnnnnnnnnnnnnnnnnnnnnnnnnnnnnnnnnnnnnnnnnnnnnnnnnnnnnnnnnnnnnnnnnnnnnnnnnnnnnnnnnnnnnnnnnnnnnnnnnnnnnnnnnnnnnnnnnnnnnnnnnnnnnnnnnnnnnnnnnnnnnnnnnnnnnnnnnnnnnnnnnnnnnnnnnnnnnnnnnnnnnnnnnnnnnnnnnnnnnnnnnnnnnnnnnnnnnnnnnnnnnnnnnnnnnnnnnnnnnnnnnnnnnnnnnnnnnnnnnnnnnnnnnnnnnnnnnnnnnnnnnnnnnnnnnnnnnnnnnnnnnnnnnnnnnnnnnnnnnnnnnnnnnnnnnnnnnnnnnnnnnnnnnnnnnnnnnnnnnnnnnnnnnnnnnnnnnnnnnnnnnnnnnnnnnnnnnnnnnnnnnnnnnnnnnnnnnnnnnnnnnnnnnnnnnnnnnnnnnnnnnnnnnnnnnnnnnnnnnnnnnnnnnnnnnnnnnnnnnnnnnnnnnnnnnnnnnnnnnnnnnnnnnnnnnnnnnnnnnnnnnnnnnnnnnnnnnnnnnnnnnnnnnnnnnnnnnnnnnnnnnnnnnnnnnnnnnnnnnnnnnnnnnnnnnnnnnnnnnnnnnnnnnnnnnnnnnnnnnnnnnnnnnnnnnnnnnnnnnnnnnnnnnnnnnnnnnnnnnnnnnnnnnnnnnnnnnnnnnnnnnnnnnnnnnnnnnnnnnnnnnnnnnnnnnnnnnnnnnnnnnnnnnnnnnnnnnnnnnnnnnnnnnnnnnnnnnnnnnnnnnnnnnnnnnnnnnnnnnnnnnnnnnnnnnnnnnnnnnnnnnnnnnnnnnnnnnnnnnnnnnnnnnnnnnnnnnnnnnnnnnnnnnnnnnnnnnnnnnnnnnnnnnnnnnnnnnnnnnnnnnnnnnnnnnnnnnnnnnnnnnnnnnnnnnnnnnnnnnnnnnnnnnnnnnnnnnnnnnnnnnnnnnnnnnnnnnnnnnnnnnnnnnnnnnnnnnnnnnnnnnnnnnnnnnnnnnnnnnnnnnnnnnnnnnnnnnnnnnnnnnnnnnnnnnnnnnnnnnnnnnnnnnnnnnnnnnnnnnnnnnnnnnnnnnnnnnnnnnnnnnnnnnnnnnnnnnnnnnnnnnnnnnnnnnnnnnnnnnnnnnnnnnnnnnnnnnnnnnnnnnnnnnnnnnnnnnnnnnnnnnnnnnnnnnnnnnnnnnnnnnnnnnnnnnnnnnnnnnnnnnnnnnnnnnnnnnnnnnnnnnnnnnnnnnnnnnnnnnnnnnnnnnnnnnnnnnnnnnnnnnnnnnnnnnnnnnnnnnnnnnnnnnnnnnnnnnnnnnnnnnnnnnnnnnnnnnnnnnnnnnnnnnnnnnnnnnnnnnnnnnnnnnnnnnnnnnnnnnnnnnnnnnnnnnnnnnnnnnnnnnnnnnnnnnnnnnnnnnnnnnnnnnnnnnnnnnnnnnnnnnnnnnnnnnnnnnnnnnnnnnnnnnnnnnnnnnnnnnnnnnnnnnnnnnnnnnnnnnnnnnnnnnnnnnnnnnnnnnnnnnnnnnnnnnnnnnnnnnnnnnnnnnnnnnnnnnnnnnnnnnnnnnnnnnnnnnnnnnnnnnnnnnnnnnnnnnnnnnnnnnnnnnnnnnnnnnnnnnnnnnnnnnnnnnnnnnnnnnnnnnnnnnnnnnnnnnnnnnnnnnnnnnnnnnnnnnnnnnnnnnnnnnnnnnnnnnnnnnnnnnnnnnnnnnnnnnnnnnnnnnnnnnnnnnnnnnnnnnnnnnnnnnnnnnnnnnnnnnnnnnnnnnnnnnnnnnnnnnnnnnnnnnnnnnnnnnnnnnnnnnnnnnnnnnnnnnnnnnnnnnnnnnnnnnnnnnnnnnnnnnnnnnnnnnnnnnnnnnnnnnnnnnnnnnnnnnnnnnnnnnnnnnnnnnnnnnnnnnnnnnnnnnnnnnnnnnnnnnnnnnnnnnnnnnnnnnnnnnnnnnnnnnnnnnnnnnnnnnnnnnnnnnnnnnnnnnnnnnnnnnnnnnnnnnnnnnnnnnnnnnnnnnnnnnnnnnnnnnnnnnnnnnnnnnnnnnnnnnnnnnnnnnnnnnnnnnnnnnnnnnnnnnnnnnnnnnnnnnnnnnnnnnnnnnnnnnnnnnnnnnnnnnnnnnnnnnnnnnnnnnnnnnnnnnnnnnnnnnnnnnnnnnnnnnnnnnnnnnnnnnnnnnnnnnnnnnnnnnnnnnnnnnnnnnnnnnnnnnnnnnnnnnnnnnnnnnnnnnnnnnnnnnnnnnnnnnnnnnnnnnnnnnnnnnnnnnnnnnnnnnnnnnnnnnnnnnnnnnnnnnnnnnnnnnnnnnnnnnnnnnnnnnnnnnnnnnnnnnnnnnnnnnnnnnnnnnnnnnnnnnnnnnnnnnnnnnnnnnnnnnnnnnnnnnnnnnnnnnnnnnnnnnnnnnnnnnnnnnnnnnnnnnnnnnnnnnnnnnnnnnnnnnnnnnnnnnnnnnnnnnnnnnnnnnnnnnnnnnnnnnnnnnnnnnnnnnnnnnnnnnnnnnnnnnnnnnnnnnnnnnnnnnnnnnnnnnnnnnnnnnnnnnnnnnnnnnnnnnnnnnnnnnnnnnnnnnnnnnnnnnnnnnnnnnnnnnnnnnnnnnnnnnnnnnnnnnnnnnnnnnnnnnnnnnnnnnnnnnnnnnnnnnnnnnnnnnnnnnnnnnnnnnnnnnnnnnnnnnnnnnnnnnnnnnnnnnnnnnnnnnnnnnnnnnnnnnnnnnnnnnnnnnnnnnnnnnnnnnnnnnnnnnnnnnnnnnnnnnnnnnnnnnnnnnnnnnnnnnnnnnnnnnnnnnnnnnnnnnnnnnnnnnnnnnnnnnnnnnnnnnnnnnnnnnnnnnnnnnnnnnnnnnnnnnnnnnnnnnnnnnnnnnnnnnnnnnnnnnnnnnnnnnnnnnnnnnnnnnnnnnnnnnnnnnnnnnnnnnnnnnnnnnnnnnnnnnnnnnnnnnnnnnnnnnnnnnnnnnnnnnnnnnnnnnnnnnnnnnnnnnnnnnnnnnnnnnnnnnnnnnnnnnnnnnnnnnnnnnnnnnnnnnnnnnnnnnnnnnnnnnnnnnnnnnnnnnnnnnnnnnnnnnnnnnnnnnnnnnnnnnnnnnnnnnnnnnnnnnnnnnnnnnnnnnnnnnnnnnnnnnnnnnnnnnnnnnnnnnnnnnnnnnnnnnnnnnnnnnnnnnnnnnnnnnnnnnnnnnnnnnnnnnnnnnnnnnnnnnnnnnnnnnnnnnnnnnnnnnnnnnnnnnnnnnnnnnnnnnnnnnnnnnnnnnnnnnnnnnnnnnnnnnnnnnnnnnnnnnnnnnnnnnnnnnnnnnnnnnnnnnnnnnnnnnnnnnnnnnnnnnnnnnnnnnnnnnnnnnnnnnnnnnnnnnnnnnnnnnnnnnnnnnnnnnnnnnnnnnnnnnnnnnnnnnnnnnnnnnnnnnnnnnnnnnnnnnnnnnnnnnnnnnnnnnnnnnnnnnnnnnnnnnnnnnnnnnnnnnnnnnnnnnnnnnnnnnnnnnnnnnnnnnnnnnnnnnnnnnnnnnnnnnnnnnnnnnnnnnnnnnnnnnnnnnnnnnnnnnnnnnnnnnnnnnnnnnnnnnnnnnnnnnnnnnnnnnnnnnnnnnnnnnnnnnnnnnnnnnnnnnnnnnnnnnnnnnnnnnnnnnnnnnnnnnnnnnnnnnnnnnnnnnnnnnnnnnnnnnnnnnnnnnnnnnnnnnnnnnnnnnnnnnnnnnnnnnnnnnnnnnnnnnnnnnnnnnnnnnnnnnnnnnnnnnnnnnnnnnnnnnnnnnnnnnnnnnnnnnnnnnnnnnnnnnnnnnnnnnnnnnnnnnnnnnnnnnnnnnnnnnnnnnnnnnnnnnnnnnnnnnnnnnnnnnnnnnnnnnnnnnnnnnnnnnnnnnnnnnnnnnnnnnnnnnnnnnnnnnnnnnnnnnnnnnnnnnnnnnnnnnnnnnnnnnnnnnnnnnnnnnnnnnnnnnnnnnnnnnnnnnnnnnnnnnnnnnnnnnnnnnnnnnnnnnnnnnnnnnnnnnnnnnnnnnnnnnnnnnnnnnnnnnnnnnnnnnnnnnnnnnnnnnnnnnnnnnnnnnnnnnnnnnnnnnnnnnnnnnnnnnnnnnnnnnnnnnnnnnnnnnnnnnnnnnnnnnnnnnnnnnnnnnnnnnnnnnnnnnnnnnnnnnnnnnnnnnnnnnnnnnnnnnnnnnnnnnnnnnnnnnnnnnnnnnnnnnnnnnnnnnnnnnnnnnnnnnnnnnnnnnnnnnnnnnnnnnnnnnnnnnnnnnnnnnnnnnnnnnnnnnnnnnnnnnnnnnnnnnnnnnnnnnnnnnnnnnnnnnnnnnnnnnnnnnnnnnnnnnnnnnnnnnnnnnnnnnnnnnnnnnnnnnnnnnnnnnnnnnnnnnnnnnnnnnnnnnnnnnnnnnnnnnnnnnnnnnnnnnnnnnnnnnnnnnnnnnnnnnnnnnnnnnnnnnnnnnnnnnnnnnnnnnnnnnnnnnnnnnnnnnnnnnnnnnnnnnnnnnnnnnnnnnnnnnnnnnnnnnnnnnnnnnnnnnnnnnnnnnnnnnnnnnnnnnnnnnnnnnnnnnnnnnnnnnnnnnnnnnnnnnnnnnnnnnnnnnnnnnnnnnnnnnnnnnnnnnnnnnnnnnnnnnnnnnnnnnnnnnnnnnnnnnnnnnnnnnnnnnnnnnnnnnnnnnnnnnnnnnnnnnnnnnnnnnnnnnnnnnnnnnnnnnnnnnnnnnnnnnnnnnnnnnnnnnnnnnnnnnnnnnnnnnnnnnnnnnnnnnnnnnnnnnnnnnnnnnnnnnnnnnnnnnnnnnnnnnnnnnnnnnnnnnnnnnnnnnnnnnnnnnnnnnnnnnnnnnnnnnnnnnnnnnnnnnnnnnnnnnnnnnnnnnnnnnnnnnnnnnnnnnnnnnnnnnnnnnnnnnnnnnnnnnnnnnnnnnnnnnnnnnnnnnnnnnnnnnnnnnnnnnnnnnnnnnnnnnnnnnnnnnnnnnnnnnnnnnnnnnnnnnnnnnnnnnnnnnnnnnnnnnnnnnnnnnnnnnnnnnnnnnnnnnnnnnnnnnnnnnnnnnnnnnnnnnnnnnnnnnnnnnnnnnnnnnnnnnnnnnnnnnnnnnnnnnnnnnnnnnnnnnnnnnnnnnnnnnnnnnnnnnnnnnnnnnnnnnnnnnnnnnnnnnnnnnnnnnnnnnnnnnnnnnnnnnnnnnnnnnnnnnnnnnnnnnnnnnnnnnnnnnnnnnnnnnnnnnnnnnnnnnnnnnnnnnnnnnnnnnnnnnnnnnnnnnnnnnnnnnnnnnnnnnnnnnnnnnnnnnnnnnnnnnnnnnnnnnnnnnnnnnnnnnnnnnnnnnnnnnnnnnnnnnnnnnnnnnnnnnnnnnnnnnnnnnnnnnnnnnnnnnnnnnnnnnnnnnnnnnnnnnnnnnnnnnnnnnnnnnnnnnnnnnnnnnnnnnnnnnnnnnnnnnnnnnnnnnnnnnnnnnnnnnnnnnnnnnnnnnnnnnnnnnnnnnnnnnnnnnnnnnnnnnnnnnnnnnnnnnnnnnnnnnnnnnnnnnnnnnnnnnnnnnnnnnnnnnnnnnnnnnnnnnnnnnnnnnnnnnnnnnnnnnnnnnnnnnnnnnnnnnnnnnnnnnnnnnnnnnnnnnnnnnnnnnnnnnnnnnnnnnnnnnnnnnnnnnnnnnnnnnnnnnnnnnnnnnnnnnnnnnnnnnnnnnnnnnnnnnnnnnnnnnnnnnnnnnnnnnnnnnnnnnnnnnnnnnnnnnnnnnnnnnnnnnnnnnnnnnnnnnnnnnnnnnnnnnnnnnnnnnnnnnnnnnnnnnnnnnnnnnnnnnnnnnnnnnnnnnnnnnnnnnnnnnnnnnnnnnnnnnnnnnnnnnnnnnnnnnnnnnnnnnnnnnnnnnnnnnnnnnnnnnnnnnnnnnnnnnnnnnnnnnnnnnnnnnnnnnnnnnnnnnnnnnnnnnnnnnnnnnnnnnnnnnnnnnnnnnnnnnnnnnnnnnnnnnnnnnnnnnnnnnnnnnnnnnnnnnnnnnnnnnnnnnnnnnnnnnnnnnnnnnnnnnnnnnnnnnnnnnnnnnnnnnnnnnnnnnnnnnnnnnnnnnnnnnnnnnnnnnnnnnnnnnnnnnnnnnnnnnnnnnnnnnnnnnnnnnnnnnnnnnnnnnnnnnnnnnnnnnnnnnnnnnnnnnnnnnnnnnnnnnnnnnnnnnnnnnnnnnnnnnnnnnnnnnnnnnnnnnnnnnnnnnnnnnnnnnnnnnnnnnnnnnnnnnnnnnnnnnnnnnnnnnnnnnnnnnnnnnnnnnnnnnnnnnnnnnnnnnnnnnnnnnnnnnnnnnnnnnnnnnnnnnnnnnnnnnnnnnnnnnnnnnnnnnnnnnnnnnnnnnnnnnnnnnnnnnnnnnnnnnnnnnnnnnnnnnnnnnnnnnnnnnnnnnnnnnnnnnnnnnnnnnnnnnnnnnnnnnnnnnnnnnnnnnnnnnnnnnnnnnnnnnnnnnnnnnnnnnnnnnnnnnnnnnnnnnnnnnnnnnnnnnnnnnnnnnnnnnnnnnnnnnnnnnnnnnnnnnnnnnnnnnnnnnnnnnnnnnnnnnnnnnnnnnnnnnnnnnnnnnnnnnnnnnnnnnnnnnnnnnnnnnnnnnnnnnnnnnnnnnnnnnnnnnnnnnnnnnnnnnnnnnnnnnnnnnnnnnnnnnnnnnnnnnnnnnnnnnnnnnnnnnnnnnnnnnnnnnnnnnnnnnnnnnnnnnnnnnnnnnnnnnnnnnnnnnnnnnnnnnnnnnnnnnnnnnnnnnnnnnnnnnnnnnnnnnnnnnnnnnnnnnnnnnnnnnnnnnnnnnnnnnnnnnnnnnnnnnnnnnnnnnnnnnnnnnnnnnnnnnnnnnnnnnnnnnnnnnnnnnnnnnnnnnnnnnnnnnnnnnnnnnnnnnnnnnnnnnnnnnnnnnnnnnnnnnnnnnnnnnnnnnnnnnnnnnnnnnnnnnnnnnnnnnnnnnnnnnnnnnnnnnnnnnnnnnnnnnnnnnnnnnnnnnnnnnnnnnnnnnnnnnnnnnnnnnnnnnnnnnnnnnnnnnnnnnnnnnnnnnnnnnnnnnnnnnnnnnnnnnnnnnnnnnnnnnnnnnnnnnnnnnnnnnnnnnnnnnnnnnnnnnnnnnnnnnnnnnnnnnnnnnnnnnnnnnnnnnnnnnnnnnnnnnnnnnnnnnnnnnnnnnnnnnnnnnnnnnnnnnnnnnnnnnnnnnnnnnnnnnnnnnnnnnnnnnnnnnnnnnnnnnnnnnnnnnnnnnnnnnnnnnnnnnnnnnnnnnnnnnnnnnnnnnnnnnnnnnnnnnnnnnnnnnnnnnnnnnnnnnnnnnnnnnnnnnnnnnnnnnnnnnnnnnnnnnnnnnnnnnnnnnnnnnnnnnnnnnnnnnnnnnnnnnnnnnnnnnnnnnnnnnnnnnnnnnnnnnnnnnnnnnnnnnnnnnnnnnnnnnnnnnnnnnnnnnnnnnnnnnnnnnnnnnnnnnnnnnnnnnnnnnnnnnnnnnnnnnnnnnnnnnnnnnnnnnnnnnnnnnnnnnnnnnnnnnnnnnnnnnnnnnnnnnnnnnnnnnnnnnnnnnnnnnnnnnnnnnnnnnnnnnnnnnnnnnnnnnnnnnnnnnnnnnnnnnnnnnnnnnnnnnnnnnnnnnnnnnnnnnnnnnnnnnnnnnnnnnnnnnnnnnnnnnnnnnnnnnnnnnnnnnnnnnnnnnnnnnnnnnnnnnnnnnnnnnnnnnnnnnnnnnnnnnnnnnnnnnnnnnnnnnnnnnnnnnnnnnnnnnnnnnnnnnnnnnnnnnnnnnnnnnnnnnnnnnnnnnnnnnnnnnnnnnnnnnnnnnnnnnnnnnnnnnnnnnnnnnnnnnnnnnnnnnnnnnnnnnnnnnnnnnnnnnnnnnnnnnnnnnnnnnnnnnnnnnnnnnnnnnnnnnnnnnnnnnnnnnnnnnnnnnnnnnnnnnnnnnnnnnnnnnnnnnnnnnnnnnnnnnnnnnnnnnnnnnnnnnnnnnnnnnnnnnnnnnnnnnnnnnnnnnnnnnnnnnnnnnnnnnnnnnnnnnnnnnnnnnnnnnnnnnnnnnnnnnnnnnnnnnnnnnnnnnnnnnnnnnnnnnnnnnnnnnnnnnnnnnnnnnnnnnnnnnnnnnnnnnnnnnnnnnnnnnnnnnnnnnnnnnnnnnnnnnnnnnnnnnnnnnnnnnnnnnnnnnnnnnnnnnnnnnnnnnnnnnnnnnnnnnnnnnnnnnnnnnnnnnnnnnnnnnnnnnnnnnnnnnnnnnnnnnnnnnnnnnnnnnnnnnnnnnnnnnnnnnnnnnnnnnnnnnnnnnnnnnnnnnnnnnnnnnnnnnnnnnnnnnnnnnnnnnnnnnnnnnnnnnnnnnnnnnnnnnnnnnnnnnnnnnnnnnnnnnnnnnnnnnnnnnnnnnnnnnnnnnnnnnnnnnnnnnnnnnnnnnnnnnnnnnnnnnnnnnnnnnnnnnnnnnnnnnnnnnnnnnnnnnnnnnnnnnnnnnnnnnnnnnnnnnnnnnnnnnnnnnnnnnnnnnnnnnnnnnnnnnnnnnnnnnnnnnnnnnnnnnnnnnnnnnnnnnnnnnnnnnnnnnnnnnnnnnnnnnnnnnnnnnnnnnnnnnnnnnnnnnnnnnnnnnnnnnnnnnnnnnnnnnnnnnnnnnnnnnnnnnnnnnnnnnnnnnnnnnnnnnnnnnnnnnnnnnnnnnnnnnnnnnnnnnnnnnnnnnnnnnnnnnnnnnnnnnnnnnnnnnnnnnnnnnnnnnnnnnnnnnnnnnnnnnnnnnnnnnnnnnnnnnnnnnnnnnnnnnnnnnnnnnnnnnnnnnnnnnnnnnnnnnnnnnnnnnnnnnnnnnnnnnnnnnnnnnnnnnnnnnnnnnnnnnnnnnnnnnnnnnnnnnnnnnnnnnnnnnnnnnnnnnnnnnnnnnnnnnnnnnnnnnnnnnnnnnnnnnnnnnnnnnnnnnnnnnnnnnnnnnnnnnnnnnnnnnnnnnnnnnnnnnnnnnnnnnnnnnnnnnnnnnnnnnnnnnnnnnnnnnnnnnnnnnnnnnnnnnnnnnnnnnnnnnnnnnnnnnnnnnnnnnnnnnnnnnnnnnnnnnnnnnnnnnnnnnnnnnnnnnnnnnnnnnnnnnnnnnnnnnnnnnnnnnnnnnnnnnnnnnnnnnnnnnnnnnnnnnnnnnnnnnnnnnnnnnnnnnnnnnnnnnnnnnnnnnnnnnnnnnnnnnnnnnnnnnnnnnnnnnnnnnnnnnnnnnnnnnnnnnnnnnnnnnnnnnnnnnnnnnnnnnnnnnnnnnnnnnnnnnnnnnnnnnnnnnnnnnnnnnnnnnnnnnnnnnnnnnnnnnnnnnnnnnnnnnnnnnnnnnnnnnnnnnnnnnnnnnnnnnnnnnnnnnnnnnnnnnnnnnnnnnnnnnnnnnnnnnnnnnnnnnnnnnnnnnnnnnnnnnnnnnnnnnnnnnnnnnnnnnnnnnnnnnnnnnnnnnnnnnnnnnnnnnnnnnnnnnnnnnnnnnnnnnnnnnnnnnnnnnnnnnnnnnnnnnnnnnnnnnnnnnnnnnnnnnnnnnnnnnnnnnnnnnnnnnnnnnnnnnnnnnnnnnnnnnnnnnnnnnnnnnnnnnnnnnnnnnnnnnnnnnnnnnnnnnnnnnnnnnnnnnnnnnnnnnnnnnnnnnnnnnnnnnnnnnnnnnnnnnnnnnnnnnnnnnnnnnnnnnnnnnnnnnnnnnnnnnnnnnnnnnnnnnnnnnnnnnnnnnnnnnnnnnnnnnnnnnnnnnnnnnnnnnnnnnnnnnnnnnnnnnnnnnnnnnnnnnnnnnnnnnnnnnnnnnnnnnnnnnnnnnnnnnnnnnnnnnnnnnnnnnnnnnnnnnnnnnnnnnnnnnnnnnnnnnnnnnnnnnnnnnnnnnnnnnnnnnnnnnnnnnnnnnnnnnnnnnnnnnnnnnnnnnnnnnnnnnnnnnnnnnnnnnnnnnnnnnnnnnnnnnnnnnnnnnnnnnnnnnnnnnnnnnnnnnnnnnnnnnnnnnnnnnnnnnnnnnnnnnnnnnnnnnnnnnnnnnnnnnnnnnnnnnnnnnnnnnnnnnnnnnnnnnnnnnnnnnnnnnnnnnnnnnnnnnnnnnnnnnnnnnnnnnnnnnnnnnnnnnnnnnnnnnnnnnnnnnnnnnnnnnnnnnnnnnnnnnnnnnnnnnnnnnnnnnnnnnnnnnnnnnnnnnnnnnnnnnnnnnnnnnnnnnnnnnnnnnnnnnnnnnnnnnnnnnnnnnnnnnnnnnnnnnnnnnnnnnnnnnnnnnnnnnnnnnnnnnnnnnnnnnnnnnnnnnnnnnnnnnnnnnnnnnnnnnnnnnnnnnnnnnnnnnnnnnnnnnnnnnnnnnnnnnnnnnnnnnnnnnnnnnnnnnnnnnnnnnnnnnnnnnnnnnnnnnnnnnnnnnnnnnnnnnnnnnnnnnnnnnnnnnnnnnnnnnnnnnnnnnnnnnnnnnnnnnnnnnnnnnnnnnnnnnnnnnnnnnnnnnnnnnnnnnnnnnnnnnnnnnnnnnnnnnnnnnnnnnnnnnnnnnnnnnnnnnnnnnnnnnnnnnnnnnnnnnnnnnnnnnnnnnnnnnnnnnnnnnnnnnnnnnnnnnnnnnnnnnnnnnnnnnnnnnnnnnnnnnnnnnnnnnnnnnnnnnnnnnnnnnnnnnnnnnnnnnnnnnnnnnnnnnnnnnnnnnnnnnnnnnnnnnnnnnnnnnnnnnnnnnnnnnnnnnnnnnnnnnnnnnnnnnnnnnnnnnnnnnnnnnnnnnnnnnnnnnnnnnnnnnnnnnnnnnnnnnnnnnnnnnnnnnnnnnnnnnnnnnnnnnnnnnnnnnnnnnnnnnnnnnnnnnnnnnnnnnnnnnnnnnnnnnnnnnnnnnnnnnnnnnnnnnnnnnnnnnnnnnnnnnnnnnnnnnnnnnnnnnnnnnnnnnnnnnnnnnnnnnnnnnnnnnnnnnnnnnnnnnnnnnnnnnnnnnnnnnnnnnnnnnnnnnnnnnnnnnnnnnnnnnnnnnnnnnnnnnnnnnnnnnnnnnnnnnnnnnnnnnnnnnnnnnnnnnnnnnnnnnnnnnnnnnnnnnnnnnnnnnnnnnnnnnnnnnnnnnnnnnnnnnnnnnnnnnnnnnnnnnnnnnnnnnnnnnnnnnnnnnnnnnnnnnnnnnnnnnnnnnnnnnnnnnnnnnnnnnnnnnnnnnnnnnnnnnnnnnnnnnnnnnnnnnnnnnnnnnnnnnnnnnnnnnnnnnnnnnnnnnnnnnnnnnnnnnnnnnnnnnnnnnnnnnnnnnnnnnnnnnnnnnnnnnnnnnnnnnnnnnnnnnnnnnnnnnnnnnnnnnnnnnnnnnnnnnnnnnnnnnnnnnnnnnnnnnnnnnnnnnnnnnnnnnnnnnnnnnnnnnnnnnnnnnnnnnnnnnnnnnnnnnnnnnnnnnnnnnnnnnnnnnnnnnnnnnnnnnnnnnnnnnnnnnnnnnnnnnnnnnnnnnnnnnnnnnnnnnnnnnnnnnnnnnnnnnnnnnnnnnnnnnnnnnnnnnnnnnnnnnnnnnnnnnnnnnnnnnnnnnnnnnnnnnnnnnnnnnnnnnnnnnnnnnnnnnnnnnnnnnnnnnnnnnnnnnnnnnnnnnnnnnnnnnnnnnnnnnnnnnnnnnnnnnnnnnnnnnnnnnnnnnnnnnnnnnnnnnnnnnnnnnnnnnnnnnnnnnnnnnnnnnnnnnnnnnnnnnnnnnnnnnnnnnnnnnnnnnnnnnnnnnnnnnnnnnnnnnnnnnnnnnnnnnnnnnnnnnnnnnnnnnnnnnnnnnnnnnnnnnnnnnnnnnnnnnnnnnnnnnnnnnnnnnnnnnnnnnnnnnnnnnnnnnnnnnnnnnnnnnnnnnnnnnnnnnnnnnnnnnnnnnnnnnnnnnnnnnnnnnnnnnnnnnnnnnnnnnnnnnnnnnnnnnnnnnnnnnnnnnnnnnnnnnnnnnnnnnnnnnnnnnnnnnnnnnnnnnnnnnnnnnnnnnnnnnnnnnnnnnnnnnnnnnnnnnnnnnnnnnnnnnnnnnnnnnnnnnnnnnnnnnnnnnnnnnnnnnnnnnnnnnnnnnnnnnnnnnnnnnnnnnnnnnnnnnnnnnnnnnnnnnnnnnnnnnnnnnnnnnnnnnnnnnnnnnnnnnnnnnnnnnnnnnnnnnnnnnnnnnnnnnnnnnnnnnnnnnnnnnnnnnnnnnnnnnnnnnnnnnnnnnnnnnnnnnnnnnnnnnnnnnnnnnnnnnnnnnnnnnnnnnnnnnnnnnnnnnnnnnnnnnnnnnnnnnnnnnnnnnnnnnnnnnnnnnnnnnnnnnnnnnnnnnnnnnnnnnnnnnnnnnnnnnnnnnnnnnnnnnnnnnnnnnnnnnnnnnnnnnnnnnnnnnnnnnnnnnnnnnnnnnnnnnnnnnnnnnnnnnnnnnnnnnnnnnnnnnnnnnnnnnnnnnnnnnnnnnnnnnnnnnnnnnnnnnnnnnnnnnnnnnnnnnnnnnnnnnnnnnnnnnnnnnnnnnnnnnnnnnnnnnnnnnnnnnnnnnnnnnnnnnnnnnnnnnnnnnnnnnnnnnnnnnnnnnnnnnnnnnnnnnnnnnnnnnnnnnnnnnnnnnnnnnnnnnnnnnnnnnnnnnnnnnnnnnnnnnnnnnnnnnnnnnnnnnnnnnnnnnnnnnnnnnnnnnnnnnnnnnnnnnnnnnnnnnnnnnnnnnnnnnnnnnnnnnnnnnnnnnnnnnnnnnnnnnnnnnnnnnnnnnnnnnnnnnnnnnnnnnnnnnnnnnnnnnnnnnnnnnnnnnnnnnnnnnnnnnnnnnnnnnnnnnnnnnnnnnnnnnnnnnnnnnnnnnnnnnnnnnnnnnnnnnnnnnnnnnnnnnnnnnnnnnnnnnnnnnnnnnnnnnnnnnnnnnnnnnnnnnnnnnnnnnnnnnnnnnnnnnnnnnnnnnnnnnnnnnnnnnnnnnnnnnnnnnnnnnnnnnnnnnnnnnnnnnnnnnnnnnnnnnnnnnnnnnnnnnnnnnnnnnnnnnnnnnnnnnnnnnnnnnnnnnnnnnnnnnnnnnnnnnnnnnnnnnnnnnnnnnnnnnnnnnnnnnnnnnnnnnnnnnnnnnnnnnnnnnnnnnnnnnnnnnnnnnnnnnnnnnnnnnnnnnnnnnnnnnnnnnnnnnnnnnnnnnnnnnnnnnnnnnnnnnnnnnnnnnnnnnnnnnnnnnnnnnnnnnnnnnnnnnnnnnnnnnnnnnnnnnnnnnnnnnnnnnnnnnnnnnnnnnnnnnnnnnnnnnnnnnnnnnnnnnnnnnnnnnnnnnnnnnnnnnnnnnnnnnnnnnnnnnnnnnnnnnnnnnnnnnnnnnnnnnnnnnnnnnnnnnnnnnnnnnnnnnnnnnnnnnnnnnnnnnnnnnnnnnnnnnnnnnnnnnnnnnnnnnnnnnnnnnnnnnnnnnnnnnnnnnnnnnnnnnnnnnnnnnnnnnnnnnnnnnnnnnnnnnnnnnnnnnnnnnnnnnnnnnnnnnnnnnnnnnnnnnnnnnnnnnnnnnnnnnnnnnnnnnnnnnnnnnnnnnnnnnnnnnnnnnnnnnnnnnnnnnnnnnnnnnnnnnnnnnnnnnnnnnnnnnnnnnnnnnnnnnnnnnnnnnnnnnnnnnnnnnnnnnnnnnnnnnnnnnnnnnnnnnnnnnnnnnnnnnnnnnnnnnnnnnnnnnnnnnnnnnnnnnnnnnnnnnnnnnnnnnnnnnnnnnnnnnnnnnnnnnnnnnnnnnnnnnnnnnnnnnnnnnnnnnnnnnnnnnnnnnnnnnnnnnnnnnnnnnnnnnnnnnnnnnnnnnnnnnnnnnnnnnnnnnnnnnnnnnnnnnnnnnnnnnnnnnnnnnnnnnnnnnnnnnnnnnnnnnnnnnnnnnnnnnnnnnnnnnnnnnnnnnnnnnnnnnnnnnnnnnnnnnnnnnnnnnnnnnnnnnnnnnnnnnnnnnnnnnnnnnnnnnnnnnnnnnnnnnnnnnnnnnnnnnnnnnnnnnnnnnnnnnnnnnnnnnnnnnnnnnnnnnnnnnnnnnnnnnnnnnnnnnnnnnnnnnnnnnnnnnnnnnnnnnnnnnnnnnnnnnnnnnnnnnnnnnnnnnnnnnnnnnnnnnnnnnnnnnnnnnnnnnnnnnnnnnnnnnnnnnnnnnnnnnnnnnnnnnnnnnnnnnnnnnnnnnnnnnnnnnnnnnnnnnnnnnnnnnnnnnnnnnnnnnnnnnnnnnnnnnnnnnnnnnnnnnnnnnnnnnnnnnnnnnnnnnnnnnnnnnnnnnnnnnnnnnnnnnnnnnnnnnnnnnnnnnnnnnnnnnnnnnnnnnnnnnnnnnnnnnnnnnnnnnnnnnnnnnnnnnnnnnnnnnnnnnnnnnnnnnnnnnnnnnnnnnnnnnnnnnnnnnnnnnnnnnnnnnnnnnnnnnnnnnnnnnnnnnnnnnnnnnnnnnnnnnnnnnnnnnnnnnnnnnnnnnnnnnnnnnnnnnnnnnnnnnnnnnnnnnnnnnnnnnnnnnnnnnnnnnnnnnnnnnnnnnnnnnnnnnnnnnnnnnnnnnnnnnnnnnnnnnnnnnnnnnnnnnnnnnnnnnnnnnnnnnnnnnnnnnnnnnnnnnnnnnnnnnnnnnnnnnnnnnnnnnnnnnnnnnnnnnnnnnnnnnnnnnnnnnnnnnnnnnnnnnnnnnnnnnnnnnnnnnnnnnnnnnnnnnnnnnnnnnnnnnnnnnnnnnnnnnnnnnnnnnnnnnnnnnnnnnnnnnnnnnnnnnnnnnnnnnnnnnnnnnnnnnnnnnnnnnnnnnnnnnnnnnnnnnnnnnnnnnnnnnnnnnnnnnnnnnnnnnnnnnnnnnnnnnnnnnnnnnnnnnnnnnnnnnnnnnnnnnnnnnnnnnnnnnnnnnnnnnnnnnnnnnnnnnnnnnnnnnnnnnnnnnnnnnnnnnnnnnnnnnnnnnnnnnnnnnnnnnnnnnnnnnnnnnnnnnnnnnnnnnnnnnnnnnnnnnnnnnnnnnnnnnnnnnnnnnnnnnnnnnnnnnnnnnnnnnnnnnnnnnnnnnnnnnnnnnnnnnnnnnnnnnnnnnnnnnnnnnnnnnnnnnnnnnnnnnnnnnnnnnnnnnnnnnnnnnnnnnnnnnnnnnnnnnnnnnnnnnnnnnnnnnnnnnnnnnnnnnnnnnnnnnnnnnnnnnnnnnnnnnnnnnnnnnnnnnnnnnnnnnnnnnnnnnnnnnnnnnnnnnnnnnnnnnnnnnnnnnnnnnnnnnnnnnnnnnnnnnnnnnnnnnnnnnnnnnnnnnnnnnnnnnnnnnnnnnnnnnnnnnnnnnnnnnnnnnnnnnnnnnnnnnnnnnnnnnnnnnnnnnnnnnnnnnnnnnnnnnnnnnnnnnnnnnnnnnnnnnnnnnnnnnnnnnnnnnnnnnnnnnnnnnnnnnnnnnnnnnnnnnnnnnnnnnnnnnnnnnnnnnnnnnnnnnnnnnnnnnnnnnnnnnnnnnnnnnnnnnnnnnnnnnnnnnnnnnnnnnnnnnnnnnnnnnnnnnnnnnnnnnnnnnnnnnnnnnnnnnnnnnnnnnnnnnnnnnnnnnnnnnnnnnnnnnnnnnnnnnnnnnnnnnnnnnnnnnnnnnnnnnnnnnnnnnnnnnnnnnnnnnnnnnnnnnnnnnnnnnnnnnnnnnnnnnnnnnnnnnnnnnnnnnnnnnnnnnnnnnnnnnnnnnnnnnnnnnnnnnnnnnnnnnnnnnnnnnnnnnnnnnnnnnnnnnnnnnnnnnnnnnnnnnnnnnnnnnnnnnnnnnnnnnnnnnnnnnnnnnnnnnnnnnnnnnnnnnnnnnnnnnnnnnnnnnnnnnnnnnnnnnnnnnnnnnnnnnnnnnnnnnnnnnnnnnnnnnnnnnnnnnnnnnnnnnnnnnnnnnnnnnnnnnnnnnnnnnnnnnnnnnnnnnnnnnnnnnnnnnnnnnnnnnnnnnnnnnnnnnnnnnnnnnnnnnnnnnnnnnnnnnnnnnnnnnnnnnnnnnnnnnnnnnnnnnnnnnnnnnnnnnnnnnnnnnnnnnnnnnnnnnnnnnnnnnnnnnnnnnnnnnnnnnnnnnnnnnnnnnnnnnnnnnnnnnnnnnnnnnnnnnnnnnnnnnnnnnnnnnnnnnnnnnnnnnnnnnnnnnnnnnnnnnnnnnnnnnnnnnnnnnnnnnnnnnnnnnnnnnnnnnnnnnnnnnnnnnnnnnnnnnnnnnnnnnnnnnnnnnnnnnnnnnnnnnnnnnnnnnnnnnnnnnnnnnnnnnnnnnnnnnnnnnnnnnnnnnnnnnnnnnnnnnnnnnnnnnnnnnnnnnnnnnnnnnnnnnnnnnnnnnnnnnnnnnnnnnnnnnnnnnnnnnnnnnnnnnnnnnnnnnnnnnnnnnnnnnnnnnnnnnnnnnnnnnnnnnnnnnnnnnnnnnnnnnnnnnnnnnnnnnnnnnnnnnnnnnnnnnnnnnnnnnnnnnnnnnnnnnnnnnnnnnnnnnnnnnnnnnnnnnnnnnnnnnnnnnnnnnnnnnnnnnnnnnnnnnnnnnnnnnnnnnnnnnnnnnnnnnnnnnnnnnnnnnnnnnnnnnnnnnnnnnnnnnnnnnnnnnnnnnnnnnnnnnnnnnnnnnnnnnnnnnnnnnnnnnnnnnnnnnnnnnnnnnnnnnnnnnnnnnnnnnnnnnnnnnnnnnnnnnnnnnnnnnnnnnnnnnnnnnnnnnnnnnnnnnnnnnnnnnnnnnnnnnnnnnnnnnnnnnnnnnnnnnnnnnnnnnnnnnnnnnnnnnnnnnnnnnnnnnnnnnnnnnnnnnnnnnnnnnnnnnnnnnnnnnnnnnnnnnnnnnnnnnnnnnnnnnnnnnnnnnnnnnnnnnnnnnnnnnnnnnnnnnnnnnnnnnnnnnnnnnnnnnnnnnnnnnnnnnnnnnnnnnnnnnnnnnnnnnnnnnnnnnnnnnnnnnnnnnnnnnnnnnnnnnnnnnnnnnnnnnnnnnnnnnnnnnnnnnnnnnnnnnnnnnnnnnnnnnnnnnnnnnnnnnnnnnnnnnnnnnnnnnnnnnnnnnnnnnnnnnnnnnnnnnnnnnnnnnnnnnnnnnnnnnnnnnnnnnnnnnnnnnnnnnnnnnnnnnnnnnnnnnnnnnnnnnnnnnnnnnnnnnnnnnnnnnnnnnnnnnnnnnnnnnnnnnnnnnnnnnnnnnnnnnnnnnnnnnnnnnnnnnnnnnnnnnnnnnnnnnnnnnnnnnnnnnnnnnnnnnnnnnnnnnnnnnnnnnnnnnnnnnnnnnnnnnnnnnnnnnnnnnnnnnnnnnnnnnnnnnnnnnnnnnnnnnnnnnnnnnnnnnnnnnnnnnnnnnnnnnnnnnnnnnnnnnnnnnnnnnnnnnnnnnnnnnnnnnnnnnnnnnnnnnnnnnnnnnnnnnnnnnnnnnnnnnnnnnnnnnnnnnnnnnnnnnnnnnnnnnnnnnnnnnnnnnnnnnnnnnnnnnnnnnnnnnnnnnnnnnnnnnnnnnnnnnnnnnnnnnnnnnnnnnnnnnnnnnnnnnnnnnnnnnnnnnnnnnnnnnnnnnnnnnnnnnnnnnnnnnnnnnnnnnnnnnnnnnnnnnnnnnnnnnnnnnnnnnnnnnnnnnnnnnnnnnnnnnnnnnnnnnnnnnnnnnnnnnnnnnnnnnnnnnnnnnnnnnnnnnnnnnnnnnnnnnnnnnnnnnnnnnnnnnnnnnnnnnnnnnnnnnnnnnnnnnnnnnnnnnnnnnnnnnnnnnnnnnnnnnnnnnnnnnnnnnnnnnnnnnnnnnnnnnnnnnnnnnnnnnnnnnnnnnnnnnnnnnnnnnnnnnnnnnnnnnnnnnnnnnnnnnnnnnnnnnnnnnnnnnnnnnnnnnnnnnnnnnnnnnnnnnnnnnnnnnnnnnnnnnnnnnnnnnnnnnnnnnnnnnnnnnnnnnnnnnnnnnnnnnnnnnnnnnnnnnnnnnnnnnnnnnnnnnnnnnnnnnnnnnnnnnnnnnnnnnnnnnnnnnnnnnnnnnnnnnnnnnnnnnnnnnnnnnnnnnnnnnnnnnnnnnnnnnnnnnnnnnnnnnnnnnnnnnnnnnnnnnnnnnnnnnnnnnnnnnnnnnnnnnnnnnnnnnnnnnnnnnnnnnnnnnnnnnnnnnnnnnnnnnnnnnnnnnnnnnnnnnnnnnnnnnnnnnnnnnnnnnnnnnnnnnnnnnnnnnnnnnnnnnnnnnnnnnnnnnnnnnnnnnnnnnnnnnnnnnnnnnnnnnnnnnnnnnnnnnnnnnnnnnnnnnnnnnnnnnnnnnnnnnnnnnnnnnnnnnnnnnnnnnnnnnnnnnnnnnnnnnnnnnnnnnnnnnnnnnnnnnnnnnnnnnnnnnnnnnnnnnnnnnnnnnnnnnnnnnnnnnnnnnnnnnnnnnnnnnnnnnnnnnnnnnnnnnnnnnnnnnnnnnnnnnnnnnnnnnnnnnnnnnnnnnnnnnnnnnnnnnnnnnnnnnnnnnnnnnnnnnnnnnnnnnnnnnnnnnnnnnnnnnnnnnnnnnnnnnnnnnnnnnnnnnnnnnnnnnnnnnnnnnnnnnnnnnnnnnnnnnnnnnnnnnnnnnnnnnnnnnnnnnnnnnnnnnnnnnnnnnnnnnnnnnnnnnnnnnnnnnnnnnnnnnnnnnnnnnnnnnnnnnnnnnnnnnnnnnnnnnnnnnnnnnnnnnnnnnnnnnnnnnnnnnnnnnnnnnnnnnnnnnnnnnnnnnnnnnnnnnnnnnnnnnnnnnnnnnnnnnnnnnnnnnnnnnnnnnnnnnnnnnnnnnnnnnnnnnnnnnnnnnnnnnnnnnnnnnnnnnnnnnnnnnnnnnnnnnnnnnnnnnnnnnnnnnnnnnnnnnnnnnnnnnnnnnnnnnnnnnnnnnnnnnnnnnnnnnnnnnnnnnnnnnnnnnnnnnnnnnnnnnnnnnnnnnnnnnnnnnnnnnnnnnnnnnnnnnnnnnnnnnnnnnnnnnnnnnnnnnnnnnnnnnnnnnnnnnnnnnnnnnnnnnnnnnnnnnnnnnnnnnnnnnnnnnnnnnnnnnnnnnnnnnnnnnnnnnnnnnnnnnnnnnnnnnnnnnnnnnnnnnnnnnnnnnnnnnnnnnnnnnnnnnnnnnnnnnnnnnnnnnnnnnnnnnnnnnnnnnnnnnnnnnnnnnnnnnnnnnnnnnnnnnnnnnnnnnnnnnnnnnnnnnnnnnnnnnnnnnnnnnnnnnnnnnnnnnnnnnnnnnnnnnnnnnnnnnnnnnnnnnnnnnnnnnnnnnnnnnnnnnnnnnnnnnnnnnnnnnnnnnnnnnnnnnnnnnnnnnnnnnnnnnnnnnnnnnnnnnnnnnnnnnnnnnnnnnnnnnnnnnnnnnnnnnnnnnnnnnnnnnnnnnnnnnnnnnnnnnnnnnnnnnnnnnnnnnnnnnnnnnnnnnnnnnnnnnnnnnnnnnnnnnnnnnnnnnnnnnnnnnnnnnnnnnnnnnnnnnnnnnnnnnnnnnnnnnnnnnnnnnnnnnnnnnnnnnnnnnnnnnnnnnnnnnnnnnnnnnnnnnnnnnnnnnnnnnnnnnnnnnnnnnnnnnnnnnnnnnnnnnnnnnnnnnnnnnnnnnnnnnnnnnnnnnnnnnnnnnnnnnnnnnnnnnnnnnnnnnnnnnnnnnnnnnnnnnnnnnnnnnnnnnnnnnnnnnnnnnnnnnnnnnnnnnnnnnnnnnnnnnnnnnnnnnnnnnnnnnnnnnnnnnnnnnnnnnnnnnnnnnnnnnnnnnnnnnnnnnnnnnnnnnnnnnnnnnnnnnnnnnnnnnnnnnnnnnnnnnnnnnnnnnnnnnnnnnnnnnnnnnnnnnnnnnnnnnnnnnnnnnnnnnnnnnnnnnnnnnnnnnnnnnnnnnnnnnnnnnnnnnnnnnnnnnnnnnnnnnnnnnnnnnnnnnnnnnnnnnnnnnnnnnnnnnnnnnnnnnnnnnnnnnnnnnnnnnnnnnnnnnnnnnnnnnnnnnnnnnnnnnnnnnnnnnnnnnnnnnnnnnnnnnnnnnnnnnnnnnnnnnnnnnnnnnnnnnnnnnnnnnnnnnnnnnnnnnnnnnnnnnnnnnnnnnnnnnnnnnnnnnnnnnnnnnnnnnnnnnnnnnnnnnnnnnnnnnnnnnnnnnnnnnnnnnnnnnnnnnnnnnnnnnnnnnnnnnnnnnnnnnnnnnnnnnnnnnnnnnnnnnnnnnnnnnnnnnnnnnnnnnnnnnnnnnnnnnnnnnnnnnnnnnnnnnnnnnnnnnnnnnnnnnnnnnnnnnnnnnnnnnnnnnnnnnnnnnnnnnnnnnnnnnnnnnnnnnnnnnnnnnnnnnnnnnnnnnnnnnnnnnnnnnnnnnnnnnnnnnnnnnnnnnnnnnnnnnnnnnnnnnnnnnnnnnnnnnnnnnnnnnnnnnnnnnnnnnnnnnnnnnnnnnnnnnnnnnnnnnnnnnnnnnnnnnnnnnnnnnnnnnnnnnnnnnnnnnnnnnnnnnnnnnnnnnnnnnnnnnnnnnnnnnnnnnnnnnnnnnnnnnnnnnnnnnnnnnnnnnnnnnnnnnnnnnnnnnnnnnnnnnnnnnnnnnnnnnnnnnnnnnnnnnnnnnnnnnnnnnnnnnnnnnnnnnnnnnnnnnnnnnnnnnnnnnnnnnnnnnnnnnnnnnnnnnnnnnnnnnnnnnnnnnnnnnnnnnnnnnnnnnnnnnnnnnnnnnnnnnnnnnnnnnnnnnnnnnnnnnnnnnnnnnnnnnnnnnnnnnnnnnnnnnnnnnnnnnnnnnnnnnnnnnnnnnnnnnnnnnnnnnnnnnnnnnnnnnnnnnnnnnnnnnnnnnnnnnnnnnnnnnnnnnnnnnnnnnnnnnnnnnnnnnnnnnnnnnnnnnnnnnnnnnnnnnnnnnnnnnnnnnnnnnnnnnnnnnnnnnnnnnnnnnnnnnnnnnnnnnnnnnnnnnnnnnnnnnnnnnnnnnnnnnnnnnnnnnnnnnnnnnnnnnnnnnnnnnnnnnnnnnnnnnnnnnnnnnnnnnnnnnnnnnnnnnnnnnnnnnnnnnnnnnnnnnnnnnnnnnnnnnnnnnnnnnnnnnnnnnnnnnnnnnnnnnnnnnnnnnnnnnnnnnnnnnnnnnnnnnnnnnnnnnnnnnnnnnnnnnnnnnnnnnnnnnnnnnnnnnnnnnnnnnnnnnnnnnnnnnnnnnnnnnnnnnnnnnnnnnnnnnnnnnnnnnnnnnnnnnnnnnnnnnnnnnnnnnnnnnnnnnnnnnnnnnnnnnnnnnnnnnnnnnnnnnnnnnnnnnnnnnnnnnnnnnnnnnnnnnnnnnnnnnnnnnnnnnnnnnnnnnnnnnnnnnnnnnnnnnnnnnnnnnnnnnnnnnnnnnnnnnnnnnnnnnnnnnnnnnnnnnnnnnnnnnnnnnnnnnnnnnnnnnnnnnnnnnnnnnnnnnnnnnnnnnnnnnnnnnnnnnnnnnnnnnnnnnnnnnnnnnnnnnnnnnnnnnnnnnnnnnnnnnnnnnnnnnnnnnnnnnnnnnnnnnnnnnnnnnnnnnnnnnnnnnnnnnnnnnnnnnnnnnnnnnnnnnnnnnnnnnnnnnnnnnnnnnnnnnnnnnnnnnnnnnnnnnnnnnnnnnnnnnnnnnnnnnnnnnnnnnnnnnnnnnnnnnnnnnnnnnnnnnnnnnnnnnnnnnnnnnnnnnnnnnnnnnnnnnnnnnnnnnnnnnnnnnnnnnnnnnnnnnnnnnnnnnnnnnnnnnnnnnnnnnnnnnnnnnnnnnnnnnnnnnnnnnnnnnnnnnnnnnnnnnnnnnnnnnnnnnnnnnnnnnnnnnnnnnnnnnnnnnnnnnnnnnnnnnnnnnnnnnnnnnnnnnnnnnnnnnnnnnnnnnnnnnnnnnnnnnnnnnnnnnnnnnnnnnnnnnnnnnnnnnnnnnnnnnnnnnnnnnnnnnnnnnnnnnnnnnnnnnnnnnnnnnnnnnnnnnnnnnnnnnnnnnnnnnnnnnnnnnnnnnnnnnnnnnnnnnnnnnnnnnnnnnnnnnnnnnnnnnnnnnnnnnnnnnnnnnnnnnnnnnnnnnnnnnnnnnnnnnnnnnnnnnnnnnnnnnnnnnnnnnnnnnnnnnnnnnnnnnnnnnnnnnnnnnnnnnnnnnnnnnnnnnnnnnnnnnnnnnnnnnnnnnnnnnnnnnnnnnnnnnnnnnnnnnnnnnnnnnnnnnnnnnnnnnnnnnnnnnnnnnnnnnnnnnnnnnnnnnnnnnnnnnnnnnnnnnnnnnnnnnnnnnnnnnnnnnnnnnnnnnnnnnnnnnnnnnnnnnnnnnnnnnnnnnnnnnnnnnnnnnnnnnnnnnnnnnnnnnnnnnnnnnnnnnnnnnnnnnnnnnnnnnnnnnnnnnnnnnnnnnnnnnnnnnnnnnnnnnnnnnnnnnnnnnnnnnnnnnnnnnnnnnnnnnnnnnnnnnnnnnnnnnnnnnnnnnnnnnnnnnnnnnnnnnnnnnnnnnnnnnnnnnnnnnnnnnnnnnnnnnnnnnnnnnnnnnnnnnnnnnnnnnnnnnnnnnnnnnnnnnnnnnnnnnnnnnnnnnnnnnnnnnnnnnnnnnnnnnnnnnnnnnnnnnnnnnnnnnnnnnnnnnnnnnnnnnnnnnnnnnnnnnnnnnnnnnnnnnnnnnnnnnnnnnnnnnnnnnnnnnnnnnnnnnnnnnnnnnnnnnnnnnnnnnnnnnnnnnnnnnnnnnnnnnnnnnnnnnnnnnnnnnnnnnnnnnnnnnnnnnnnnnnnnnnnnnnnnnnnnnnnnnnnnnnnnnnnnnnnnnnnnnnnnnnnnnnnnnnnnnnnnnnnnnnnnnnnnnnnnnnnnnnnnnnnnnnnnnnnnnnnnnnnnnnnnnnnnnnnnnnnnnnnnnnnnnnnnnnnnnnnnnnnnnnnnnnnnnnnnnnnnnnnnnnnnnnnnnnnnnnnnnnnnnnnnnnnnnnnnnnnnnnnnnnnnnnnnnnnnnnnnnnnnnnnnnnnnnnnnnnnnnnnnnnnnnnnnnnnnnnnnnnnnnnnnnnnnnnnnnnnnnnnnnnnnnnnnnnnnnnnnnnnnnnnnnnnnnnnnnnnnnnnnnnnnnnnnnnnnnnnnnnnnnnnnnnnnnnnnnnnnnnnnnnnnnnnnnnnnnnnnnnnnnnnnnnnnnnnnnnnnnnnnnnnnnnnnnnnnnnnnnnnnnnnnnnnnnnnnnnnnnnnnnnnnnnnnnnnnnnnnnnnnnnnnnnnnnnnnnnnnnnnnnnnnnnnnnnnnnnnnnnnnnnnnnnnnnnnnnnnnnnnnnnnnnnnnnnnnnnnnnnnnnnnnnnnnnnnnnnnnnnnnnnnnnnnnnnnnnnnnnnnnnnnnnnnnnnnnnnnnnnnnnnnnnnnnnnnnnnnnnnnnnnnnnnnnnnnnnnnnnnnnnnnnnnnnnnnnnnnnnnnnnnnnnnnnnnnnnnnnnnnnnnnnnnnnnnnnnnnnnnnnnnnnnnnnnnnnnnnnnnnnnnnnnnnnnnnnnnnnnnnnnnnnnnnnnnnnnnnnnnnnnnnnnnnnnnnnnnnnnnnnnnnnnnnnnnnnnnnnnnnnnnnnnnnnnnnnnnnnnnnnnnnnnnnnnnnnnnnnnnnnnnnnnnnnnnnnnnnnnnnnnnnnnnnnnnnnnnnnnnnnnnnnnnnnnnnnnnnnnnnnnnnnnnnnnnnnnnnnnnnnnnnnnnnnnnnnnnnnnnnnnnnnnnnnnnnnnnnnnnnnnnnnnnnnnnnnnnnnnnnnnnnnnnnnnnnnnnnnnnnnnnnnnnnnnnnnnnnnnnnnnnnnnnnnnnnnnnnnnnnnnnnnnnnnnnnnnnnnnnnnnnnnnnnnnnnnnnnnnnnnnnnnnnnnnnnnnnnnnnnnnnnnnnnnnnnnnnnnnnnnnnnnnnnnnnnnnnnnnnnnnnnnnnnnnnnnnnnnnnnnnnnnnnnnnnnnnnnnnnnnnnnnnnnnnnnnnnnnnnnnnnnnnnnnnnnnnnnnnnnnnnnnnnnnnnnnnnnnnnnnnnnnnnnnnnnnnnnnnnnnnnnnnnnnnnnnnnnnnnnnnnnnnnnnnnnnnnnnnnnnnnnnnnnnnnnnnnnnnnnnnnnnnnnnnnnnnnnnnnnnnnnnnnnnnnnnnnnnnnnnnnnnnnnnnnnnnnnnnnnnnnnnnnnnnnnnnnnnnnnnnnnnnnnnnnnnnnnnnnnnnnnnnnnnnnnnnnnnnnnnnnnnnnnnnnnnnnnnnnnnnnnnnnnnnnnnnnnnnnnnnnnnnnnnnnnnnnnnnnnnnnnnnnnnnnnnnnnnnnnnnnnnnnnnnnnnnnnnnnnnnnnnnnnnnnnnnnnnnnnnnnnnnnnnnnnnnnnnnnnnnnnnnnnnnnnnnnnnnnnnnnnnnnnnnnnnnnnnnnnnnnnnnnnnnnnnnnnnnnnnnnnnnnnnnnnnnnnnnnnnnnnnnnnnnnnnnnnnnnnnnnnnnnnnnnnnnnnnnnnnnnnnnnnnnnnnnnnnnnnnnnnnnnnnnnnnnnnnnnnnnnnnnnnnnnnnnnnnnnnnnnnnnnnnnnnnnnnnnnnnnnnnnnnnnnnnnnnnnnnnnnnnnnnnnnnnnnnnnnnnnnnnnnnnnnnnnnnnnnnnnnnnnnnnnnnnnnnnnnnnnnnnnnnnnnnnnnnnnnnnnnnnnnnnnnnnnnnnnnnnnnnnnnnnnnnnnnnnnnnnnnnnnnnnnnnnnnnnnnnnnnnnnnnnnnnnnnnnnnnnnnnnnnnnnnnnnnnnnnnnnnnnnnnnnnnnnnnnnnnnnnnnnnnnnnnnnnnnnnnnnnnnnnnnnnnnnnnnnnnnnnnnnnnnnnnnnnnnnnnnnnnnnnnnnnnnnnnnnnnnnnnnnnnnnnnnnnnnnnnnnnnnnnnnnnnnnnnnnnnnnnnnnnnnnnnnnnnnnnnnnnnnnnnnnnnnnnnnnnnnnnnnnnnnnnnnnnnnnnnnnnnnnnnnnnnnnnnnnnnnnnnnnnnnnnnnnnnnnnnnnnnnnnnnnnnnnnnnnnnnnnnnnnnnnnnnnnnnnnnnnnnnnnnnnnnnnnnnnnnnnnnnnnnnnnnnnnnnnnnnnnnnnnnnnnnnnnnnnnnnnnnnnnnnnnnnnnnnnnnnnnnnnnnnnnnnnnnnnnnnnnnnnnnnnnnnnnnnnnnnnnnnnnnnnnnnnnnnnnnnnnnnnnnnnnnnnnnnnnnnnnnnnnnnnnnnnnnnnnnnnnnnnnnnnnnnnnnnnnnnnnnnnnnnnnnnnnnnnnnnnnnnnnnnnnnnnnnnnnnnnnnnnnnnnnnnnnnnnnnnnnnnnnnnnnnnnnnnnnnnnnnnnnnnnnnnnnnnnnnnnnnnnnnnnnnnnnnnnnnnnnnnnnnnnnnnnnnnnnnnnnnnnnnnnnnnnnnnnnnnnnnnnnnnnnnnnnnnnnnnnnnnnnnnnnnnnnnnnnnnnnnnnnnnnnnnnnnnnnnnnnnnnnnnnnnnnnnnnnnnnnnnnnnnnnnnnnnnnnnnnnnnnnnnnnnnnnnnnnnnnnnnnnnnnnnnnnnnnnnnnnnnnnnnnnnnnnnnnnnnnnnnnnnnnnnnnnnnnnnnnnnnnnnnnnnnnnnnnnnnnnnnnnnnnnnnnnnnnnnnnnnnnnnnnnnnnnnnnnnnnnnnnnnnnnnnnnnnnnnnnnnnnnnnnnnnnnnnnnnnnnnnnnnnnnnnnnnnnnnnnnnnnnnnnnnnnnnnnnnnnnnnnnnnnnnnnnnnnnnnnnnnnnnnnnnnnnnnnnnnnnnnnnnnnnnnnnnnnnnnnnnnnnnnnnnnnnnnnnnnnnnnnnnnnnnnnnnnnnnnnnnnnnnnnnnnnnnnnnnnnnnnnnnnnnnnnnnnnnnnnnnnnnnnnnnnnnnnnnnnnnnnnnnnnnnnnnnnnnnnnnnnnnnnnnnnnnnnnnnnnnnnnnnnnnnnnnnnnnnnnnnnnnnnnnnnnnnnnnnnnnnnnnnnnnnnnnnnnnnnnnnnnnnnnnnnnnnnnnnnnnnnnnnnnnnnnnnnnnnnnnnnnnnnnnnnnnnnnnnnnnnnnnnnnnnnnnnnnnnnnnnnnnnnnnnnnnnnnnnnnnnnnnnnnnnnnnnnnnnnnnnnnnnnnnnnnnnnnnnnnnnnnnnnnnnnnnnnnnnnnnnnnnnnnnnnnnnnnnnnnnnnnnnnnnnnnnnnnnnnnnnnnnnnnnnnnnnnnnnnnnnnnnnnnnnnnnnnnnnnnnnnnnnnnnnnnnnnnnnnnnnnnnnnnnnnnnnnnnnnnnnnnnnnnnnnnnnnnnnnnnnnnnnnnnnnnnnnnnnnnnnnnnnnnnnnnnnnnnnnnnnnnnnnnnnnnnnnnnnnnnnnnnnnnnnnnnnnnnnnnnnnnnnnnnnnnnnnnnnnnnnnnnnnnnnnnnnnnnnnnnnnnnnnnnnnnnnnnnnnnnnnnnnnnnnnnnnnnnnnnnnnnnnnnnnnnnnnnnnnnnnnnnnnnnnnnnnnnnnnnnnnnnnnnnnnnnnnnnnnnnnnnnnnnnnnnnnnnnnnnnnnnnnnnnnnnnnnnnnnnnnnnnnnnnnnnnnnnnnnnnnnnnnnnnnnnnnnnnnnnnnnnnnnnnnnnnnnnnnnnnnnnnnnnnnnnnnnnnnnnnnnnnnnnnnnnnnnnnnnnnnnnnnnnnnnnnnnnnnnnnnnnnnnnnnnnnnnnnnnnnnnnnnnnnnnnnnnnnnnnnnnnnnnnnnnnnnnnnnnnnnnnnnnnnnnnnnnnnnnnnnnnnnnnnnnnnnnnnnnnnnnnnnnnnnnnnnnnnnnnnnnnnnnnnnnnnnnnnnnnnnnnnnnnnnnnnnnnnnnnnnnnnnnnnnnnnnnnnnnnnnnnnnnnnnnnnnnnnnnnnnnnnnnnnnnnnnnnnnnnnnnnnnnnnnnnnnnnnnnnnnnnnnnnnnnnnnnnnnnnnnnnnnnnnnnnnnnnnnnnnnnnnnnnnnnnnnnnnnnnnnnnnnnnnnnnnnnnnnnnnnnnnnnnnnnnnnnnnnnnnnnnnnnnnnnnnnnnnnnnnnnnnnnnnnnnnnnnnnnnnnnnnnnnnnnnnnnnnnnnnnnnnnnnnnnnnnnnnnnnnnnnnnnnnnnnnnnnnnnnnnnnnnnnnnnnnnnnnnnnnnnnnnnnnnnnnnnnnnnnnnnnnnnnnnnnnnnnnnnnnnnnnnnnnnnnnnnnnnnnnnnnnnnnnnnnnnnnnnnnnnnnnnnnnnnnnnnnnnnnnnnnnnnnnnnnnnnnnnnnnnnnnnnnnnnnnnnnnnnnnnnnnnnnnnnnnnnnnnnnnnnnnnnnnnnnnnnnnnnnnnnnnnnnnnnnnnnnnnnnnnnnnnnnnnnnnnnnnnnnnnnnnnnnnnnnnnnnnnnnnnnnnnnnnnnnnnnnnnnnnnnnnnnnnnnnnnnnnnnnnnnnnnnnnnnnnnnnnnnnnnnnnnnnnnnnnnnnnnnnnnnnnnnnnnnnnnnnnnnnnnnnnnnnnnnnnnnnnnnnnnnnnnnnnnnnnnnnnnnnnnnnnnnnnnnnnnnnnnnnnnnnnnnnnnnnnnnnnnnnnnnnnnnnnnnnnnnnnnnnnnnnnnnnnnnnnnnnnnnnnnnnnnnnnnnnnnnnnnnnnnnnnnnnnnnnnnnnnnnnnnnnnnnnnnnnnnnnnnnnnnnnnnnnnnnnnnnnnnnnnnnnnnnnnnnnnnnnnnnnnnnnnnnnnnnnnnnnnnnnnnnnnnnnnnnnnnnnnnnnnnnnnnnnnnnnnnnnnnnnnnnnnnnnnnnnnnnnnnnnnnnnnnnnnnnnnnnnnnnnnnnnnnnnnnnnnnnnnnnnnnnnnnnnnnnnnnnnnnnnnnnnnnnnnnnnnnnnnnnnnnnnnnnnnnnnnnnnnnnnnnnnnnnnnnnnnnnnnnnnnnnnnnnnnnnnnnnnnnnnnnnnnnnnnnnnnnnnnnnnnnnnnnnnnnnnnnnnnnnnnnnnnnnnnnnnnnnnnnnnnnnnnnnnnnnnnnnnnnnnnnnnnnnnnnnnnnnnnnnnnnnnnnnnnnnnnnnnnnnnnnnnnnnnnnnnnnnnnnnnnnnnnnnnnnnnnnnnnnnnnnnnnnnnnnnnnnnnnnnnnnnnnnnnnnnnnnnnnnnnnnnnnnnnnnnnnnnnnnnnnnnnnnnnnnnnnnnnnnnnnnnnnnnnnnnnnnnnnnnnnnnnnnnnnnnnnnnnnnnnnnnnnnnnnnnnnnnnnnnnnnnnnnnnnnnnnnnnnnnnnnnnnnnnnnnnnnnnnnnnnnnnnnnnnnnnnnnnnnnnnnnnnnnnnnnnnnnnnnnnnnnnnnnnnnnnnnnnnnnnnnnnnnnnnnnnnnnnnnnnnnnnnnnnnnnnnnnnnnnnnnnnnnnnnnnnnnnnnnnnnnnnnnnnnnnnnnnnnnnnnnnnnnnnnnnnnnnnnnnnnnnnnnnnnnnnnnnnnnnnnnnnnnnnnnnnnnnnnnnnnnnnnnnnnnnnnnnnnnnnnnnnnnnnnnnnnnnnnnnnnnnnnnnnnnnnnnnnnnnnnnnnnnnnnnnnnnnnnnnnnnnnnnnnnnnnnnnnnnnnnnnnnnnnnnnnnnnnnnnnnnnnnnnnnnnnnnnnnnnnnnnnnnnnnnnnnnnnnnnnnnnnnnnnnnnnnnnnnnnnnnnnnnnnnnnnnnnnnnnnnnnnnnnnnnnnnnnnnnnnnnnnnnnnnnnnnnnnnnnnnnnnnnnnnnnnnnnnnnnnnnnnnnnnnnnnnnnnnnnnnnnnnnnnnnnnnnnnnnnnnnnnnnnnnnnnnnnnnnnnnnnnnnnnnnnnnnnnnnnnnnnnnnnnnnnnnnnnnnnnnnnnnnnnnnnnnnnnnnnnnnnnnnnnnnnnnnnnnnnnnnnnnnnnnnnnnnnnnnnnnnnnnnnnnnnnnnnnnnnnnnnnnnnnnnnnnnnnnnnnnnnnnnnnnnnnnnnnnnnnnnnnnnnnnnnnnnnnnnnnnnnnnnnnnnnnnnnnnnnnnnnnnnnnnnnnnnnnnnnnnnnnnnnnnnnnnnnnnnnnnnnnnnnnnnnnnnnnnnnnnnnnnnnnnnnnnnnnnnnnnnnnnnnnnnnnnnnnnnnnnnnnnnnnnnnnnnnnnnnnnnnnnnnnnnnnnnnnnnnnnnnnnnnnnnnnnnnnnnnnnnnnnnnnnnnnnnnnnnnnnnnnnnnnnnnnnnnnnnnnnnnnnnnnnnnnnnnnnnnnnnnnnnnnnnnnnnnnnnnnnnnnnnnnnnnnnnnnnnnnnnnnnnnnnnnnnnnnnnnnnnnnnnnnnnnnnnnnnnnnnnnnnnnnnnnnnnnnnnnnnnnnnnnnnnnnnnnnnnnnnnnnnnnnnnnnnnnnnnnnnnnnnnnnnnnnnnnnnnnnnnnnnnnnnnnnnnnnnnnnnnnnnnnnnnnnnnnnnnnnnnnnnnnnnnnnnnnnnnnnnnnnnnnnnnnnnnnnnnnnnnnnnnnnnnnnnnnnnnnnnnnnnnnnnnnnnnnnnnnnnnnnnnnnnnnnnnnnnnnnnnnnnnnnnnnnnnnnnnnnnnnnnnnnnnnnnnnnnnnnnnnnnnnnnnnnnnnnnnnnnnnnnnnnnnnnnnnnnnnnnnnnnnnnnnnnnnnnnnnnnnnnnnnnnnnnnnnnnnnnnnnnnnnnnnnnnnnnnnnnnnnnnnnnnnnnnnnnnnnnnnnnnnnnnnnnnnnnnnnnnnnnnnnnnnnnnnnnnnnnnnnnnnnnnnnnnnnnnnnnnnnnnnnnnnnnnnnnnnnnnnnnnnnnnnnnnnnnnnnnnnnnnnnnnnnnnnnnnnnnnnnnnnnnnnnnnnnnnnnnnnnnnnnnnnnnnnnnnnnnnnnnnnnnnnnnnnnnnnnnnnnnnnnnnnnnnnnnnnnnnnnnnnnnnnnnnnnnnnnnnnnnnnnnnnnnnnnnnnnnnnnnnnnnnnnnnnnnnnnnnnnnnnnnnnnnnnnnnnnnnnnnnnnnnnnnnnnnnnnnnnnnnnnnnnnnnnnnnnnnnnnnnnnnnnnnnnnnnnnnnnnnnnnnnnnnnnnnnnnnnnnnnnnnnnnnnnnnnnnnnnnnnnnnnnnnnnnnnnnnnnnnnnnnnnnnnnnnnnnnnnnnnnnnnnnnnnnnnnnnnnnnnnnnnnnnnnnnnnnnnnnnnnnnnnnnnnnnnnnnnnnnnnnnnnnnnnnnnnnnnnnnnnnnnnnnnnnnnnnnnnnnnnnnnnnnnnnnnnnnnnnnnnnnnnnnnnnnnnnnnnnnnnnnnnnnnnnnnnnnnnnnnnnnnnnnnnnnnnnnnnnnnnnnnnnnnnnnnnnnnnnnnnnnnnnnnnnnnnnnnnnnnnnnnnnnnnnnnnnnnnnnnnnnnnnnnnnnnnnnnnnnnnnnnnnnnnnnnnnnnnnnnnnnnnnnnnnnnnnnnnnnnnnnnnnnnnnnnnnnnnnnnnnnnnnnnnnnnnnnnnnnnnnnnnnnnnnnnnnnnnnnnnnnnnnnnnnnnnnnnnnnnnnnnnnnnnnnnnnnnnnnnnnnnnnnnnnnnnnnnnnnnnnnnnnnnnnnnnnnnnnnnnnnnnnnnnnnnnnnnnnnnnnnnnnnnnnnnnnnnnnnnnnnnnnnnnnnnnnnnnnnnnnnnnnnnnnnnnnnnnnnnnnnnnnnnnnnnnnnnnnnnnnnnnnnnnnnnnnnnnnnnnnnnnnnnnnnnnnnnnnnnnnnnnnnnnnnnnnnnnnnnnnnnnnnnnnnnnnnnnnnnnnnnnnnnnnnnnnnnnnnnnnnnnnnnnnnnnnnnnnnnnnnnnnnnnnnnnnnnnnnnnnnnnnnnnnnnnnnnnnnnnnnnnnnnnnnnnnnnnnnnnnnnnnnnnnnnnnnnnnnnnnnnnnnnnnnnnnnnnnnnnnnnnnnnnnnnnnnnnnnnnnnnnnnnnnnnnnnnnnnnnnnnnnnnnnnnnnnnnnnnnnnnnnnnnnnnnnnnnnnnnnnnnnnnnnnnnnnnnnnnnnnnnnnnnnnnnnnnnnnnnnnnnnnnnnnnnnnnnnnnnnnnnnnnnnnnnnnnnnnnnnnnnnnnnnnnnnnnnnnnnnnnnnnnnnnnnnnnnnnnnnnnnnnnnnnnnnnnnnnnnnnnnnnnnnnnnnnnnnnnnnnnnnnnnnnnnnnnnnnnnnnnnnnnnnnnnnnnnnnnnnnnnnnnnnnnnnnnnnnnnnnnnnnnnnnnnnnnnnnnnnnnnnnnnnnnnnnnnnnnnnnnnnnnnnnnnnnnnnnnnnnnnnnnnnnnnnnnnnnnnnnnnnnnnnnnnnnnnnnnnnnnnnnnnnnnnnnnnnnnnnnnnnnnnnnnnnnnnnnnnnnnnnnnnnnnnnnnnnnnnnnnnnnnnnnnnnnnnnnnnnnnnnnnnnnnnnnnnnnnnnnnnnnnnnnnnnnnnnnnnnnnnnnnnnnnnnnnnnnnnnnnnnnnnnnnnnnnnnnnnnnnnnnnnnnnnnnnnnnnnnnnnnnnnnnnnnnnnnnnnnnnnnnnnnnnnnnnnnnnnnnnnnnnnnnnnnnnnnnnnnnnnnnnnnnnnnnnnnnnnnnnnnnnnnnnnnnnnnnnnnnnnnnnnnnnnnnnnnnnnnnnnnnnnnnnnnnnnnnnnnnnnnnnnnnnnnnnnnnnnnnnnnnnnnnnnnnnnnnnnnnnnnnnnnnnnnnnnnnnnnnnnnnnnnnnnnnnnnnnnnnnnnnnnnnnnnnnnnnnnnnnnnnnnnnnnnnnnnnnnnnnnnnnnnnnnnnnnnnnnnnnnnnnnnnnnnnnnnnnnnnnnnnnnnnnnnnnnnnnnnnnnnnnnnnnnnnnnnnnnnnnnnnnnnnnnnnnnnnnnnnnnnnnnnnnnnnnnnnnnnnnnnnnnnnnnnnnnnnnnnnnnnnnnnnnnnnnnnnnnnnnnnnnnnnnnnnnnnnnnnnnnnnnnnnnnnnnnnnnnnnnnnnnnnnnnnnnnnnnnnnnnnnnnnnnnnnnnnnnnnnnnnnnnnnnnnnnnnnnnnnnnnnnnnnnnnnnnnnnnnnnnnnnnnnnnnnnnnnnnnnnnnnnnnnnnnnnnnnnnnnnnnnnnnnnnnnnnnnnnnnnnnnnnnnnnnnnnnnnnnnnnnnnnnnnnnnnnnnnnnnnnnnnnnnnnnnnnnnnnnnnnnnnnnnnnnnnnnnnnnnnnnnnnnnnnnnnnnnnnnnnnnnnnnnnnnnnnnnnnnnnnnnnnnnnnnnnnnnnnnnnnnnnnnnnnnnnnnnnnnnnnnnnnnnnnnnnnnnnnnnnnnnnnnnnnnnnnnnnnnnnnnnnnnnnnnnnnnnnnnnnnnnnnnnnnnnnnnnnnnnnnnnnnnnnnnnnnnnnnnnnnnnnnnnnnnnnnnnnnnnnnnnnnnnnnnnnnnnnnnnnnnnnnnnnnnnnnnnnnnnnnnnnnnnnnnnnnnnnnnnnnnnnnnnnnnnnnnnnnnnnnnnnnnnnnnnnnnnnnnnnnnnnnnnnnnnnnnnnnnnnnnnnnnnnnnnnnnnnnnnnnnnnnnnnnnnnnnnnnnnnnnnnnnnnnnnnnnnnnnnnnnnnnnnnnnnnnnnnnnnnnnnnnnnnnnnnnnnnnnnnnnnnnnnnnnnnnnnnnnnnnnnnnnnnnnnnnnnnnnnnnnnnnnnnnnnnnnnnnnnnnnnnnnnnnnnnnnnnnnnnnnnnnnnnnnnnnnnnnnnnnnnnnnnnnnnnnnnnnnnnnnnnnnnnnnnnnnnnnnnnnnnnnnnnnnnnnnnnnnnnnnnnnnnnnnnnnnnnnnnnnnnnnnnnnnnnnnnnnnnnnnnnnnnnnnnnnnnnnnnnnnnnnnnnnnnnnnnnnnnnnnnnnnnnnnnnnnnnnnnnnnnnnnnnnnnnnnnnnnnnnnnnnnnnnnnnnnnnnnnnnnnnnnnnnnnnnnnnnnnnnnnnnnnnnnnnnnnnnnnnnnnnnnnnnnnnnnnnnnnnnnnnnnnnnnnnnnnnnnnnnnnnnnnnnnnnnnnnnnnnnnnnnnnnnnnnnnnnnnnnnnnnnnnnnnnnnnnnnnnnnnnnnnnnnnnnnnnnnnnnnnnnnnnnnnnnnnnnnnnnnnnnnnnnnnnnnnnnnnnnnnnnnnnnnnnnnnnnnnnnnnnnnnnnnnnnnnnnnnnnnnnnnnnnnnnnnnnnnnnnnnnnnnnnnnnnnnnnnnnnnnnnnnnnnnnnnnnnnnnnnnnnnnnnnnnnnnnnnnnnnnnnnnnnnnnnnnnnnnnnnnnnnnnnnnnnnnnnnnnnnnnnnnnnnnnnnnnnnnnnnnnnnnnnnnnnnnnnnnnnnnnnnnnnnnnnnnnnnnnnnnnnnnnnnnnnnnnnnnnnnnnnnnnnnnnnnnnnnnnnnnnnnnnnnnnnnnnnnnnnnnnnnnnnnnnnnnnnnnnnnnnnnnnnnnnnnnnnnnnnnnnnnnnnnnnnnnnnnnnnnnnnnnnnnnnnnnnnnnnnnnnnnnnnnnnnnnnnnnnnnnnnnnnnnnnnnnnnnnnnnnnnnnnnnnnnnnnnnnnnnnnnnnnnnnnnnnnnnnnnnnnnnnnnnnnnnnnnnnnnnnnnnnnnnnnnnnnnnnnnnnnnnnnnnnnnnnnnnnnnnnnnnnnnnnnnnnnnnnnnnnnnnnnnnnnnnnnnnnnnnnnnnnnnnnnnnnnnnnnnnnnnnnnnnnnnnnnnnnnnnnnnnnnnnnnnnnnnnnnnnnnnnnnnnnnnnnnnnnnnnnnnnnnnnnnnnnnnnnnnnnnnnnnnnnnnnnnnnnnnnnnnnnnnnnnnnnnnnnnnnnnnnnnnnnnnnnnnnnnnnnnnnnnnnnnnnnnnnnnnnnnnnnnnnnnnnnnnnnnnnnnnnnnnnnnnnnnnnnnnnnnnnnnnnnnnnnnnnnnnnnnnnnnnnnnnnnnnnnnnnnnnnnnnnnnnnnnnnnnnnnnnnnnnnnnnnnnnnnnnnnnnnnnnnnnnnnnnnnnnnnnnnnnnnnnnnnnnnnnnnnnnnnnnnnnnnnnnnnnnnnnnnnnnnnnnnnnnnnnnnnnnnnnnnnnnnnnnnnnnnnnnnnnnnnnnnnnnnnnnnnnnnnnnnnnnnnnnnnnnnnnnnnnnnnnnnnnnnnnnnnnnnnnnnnnnnnnnnnnnnnnnnnnnnnnnnnnnnnnnnnnnnnnnnnnnnnnnnnnnnnnnnnnnnnnnnnnnnnnnnnnnnnnnnnnnnnnnnnnnnnnnnnnnnnnnnnnnnnnnnnnnnnnnnnnnnnnnnnnnnnnnnnnnnnnnnnnnnnnnnnnnnnnnnnnnnnnnnnnnnnnnnnnnnnnnnnnnnnnnnnnnnnnnnnnnnnnnnnnnnnnnnnnnnnnnnnnnnnnnnnnnnnnnnnnnnnnnnnnnnnnnnnnnnnnnnnnnnnnnnnnnnnnnnnnnnnnnnnnnnnnnnnnnnnnnnnnnnnnnnnnnnnnnnnnnnnnnnnnnnnnnnnnnnnnnnnnnnnnnnnnnnnnnnnnnnnnnnnnnnnnnnnnnnnnnnnnnnnnnnnnnnnnnnnnnnnnnnnnnnnnnnnnnnnnnnnnnnnnnnnnnnnnnnnnnnnnnnnnnnnnnnnnnnnnnnnnnnnnnnnnnnnnnnnnnnnnnnnnnnnnnnnnnnnnnnnnnnnnnnnnnnnnnnnnnnnnnnnnnnnnnnnnnnnnnnnnnnnnnnnnnnnnnnnnnnnnnnnnnnnnnnnnnnnnnnnnnnnnnnnnnnnnnnnnnnnnnnnnnnnnnnnnnnnnnnnnnnnnnnnnnnnnnnnnnnnnnnnnnnnnnnnnnnnnnnnnnnnnnnnnnnnnnnnnnnnnnnnnnnnnnnnnnnnnnnnnnnnnnnnnnnnnnnnnnnnnnnnnnnnnnnnnnnnnnnnnnnnnnnnnnnnnnnnnnnnnnnnnnnnnnnnnnnnnnnnnnnnnnnnnnnnnnnnnnnnnnnnnnnnnnnnnnnnnnnnnnnnnnnnnnnnnnnnnnnnnnnnnnnnnnnnnnnnnnnnnnnnnnnnnnnnnnnnnnnnnnnnnnnnnnnnnnnnnnnnnnnnnnnnnnnnnnnnnnnnnnnnnnnnnnnnnnnnnnnnnnnnnnnnnnnnnnnnnnnnnnnnnnnnnnnnnnnnnnnnnnnnnnnnnnnnnnnnnnnnnnnnnnnnnnnnnnnnnnnnnnnnnnnnnnnnnnnnnnnnnnnnnnnnnnnnnnnnnnnnnnnnnnnnnnnnnnnnnnnnnnnnnnnnnnnnnnnnnnnnnnnnnnnnnnnnnnnnnnnnnnnnnnnnnnnnnnnnnnnnnnnnnnnnnnnnnnnnnnnnnnnnnnnnnnnnnnnnnnnnnnnnnnnnnnnnnnnnnnnnnnnnnnnnnnnnnnnnnnnnnnnnnnnnnnnnnnnnnnnnnnnnnnnnnnnnnnnnnnnnnnnnnnnnnnnnnnnnnnnnnnnnnnnnnnnnnnnnnnnnnnnnnnnnnnnnnnnnnnnnnnnnnnnnnnnnnnnnnnnnnnnnnnnnnnnnnnnnnnnnnnnnnnnnnnnnnnnnnnnnnnnnnnnnnnnnnnnnnnnnnnnnnnnnnnnnnnnnnnnnnnnnnnnnnnnnnnnnnnnnnnnnnnnnnnnnnnnnnnnnnnnnnnnnnnnnnnnnnnnnnnnnnnnnnnnnnnnnnnnnnnnnnnnnnnnnnnnnnnnnnnnnnnnnnnnnnnnnnnnnnnnnnnnnnnnnnnnnnnnnnnnnnnnnnnnnnnnn

SEQ ID NO: 3046 - DNA, 23 bp, synthetic construct
  source 1..23: mol_type = other DNA
cgccagccttggggccgtgactc

SEQ ID NO: 3047 - DNA, 23 bp, synthetic construct
  source 1..23: mol_type = other DNA
ccgccagccttggggccgtgact

SEQ ID NO: 3048 - DNA, 23 bp, synthetic construct
  source 1..23: mol_type = other DNA
accgccagccttggggccgtgac

SEQ ID NO: 3049 - DNA, 23 bp, synthetic construct
  source 1..23: mol_type = other DNA
caccgccagccttggggccgtga

SEQ ID NO: 3050 - DNA, 23 bp, synthetic construct
  source 1..23: mol_type = other DNA
ccaccgccagccttggggccgtg

SEQ ID NO: 3051 - DNA, 23 bp, synthetic construct
  source 1..23: mol_type = other DNA
cccaccgccagccttggggccgt

SEQ ID NO: 3052 - DNA, 23 bp, synthetic construct
  source 1..23: mol_type = other DNA
gcccaccgccagccttggggccg

SEQ ID NO: 3053 - DNA, 23 bp, synthetic construct
  source 1..23: mol_type = other DNA
cgcccaccgccagccttggggcc

SEQ ID NO: 3054 - DNA, 23 bp, synthetic construct
  source 1..23: mol_type = other DNA
gcgcccaccgccagccttggggc

SEQ ID NO: 3055 - DNA, 23 bp, synthetic construct
  source 1..23: mol_type = other DNA
ggcgcccaccgccagccttgggg

SEQ ID NO: 3056 - DNA, 23 bp, synthetic construct
  source 1..23: mol_type = other DNA
gggcgcccaccgccagccttggg

SEQ ID NO: 3057 - DNA, 23 bp, synthetic construct
  source 1..23: mol_type = other DNA
ggggcgcccaccgccagccttgg

SEQ ID NO: 3058 - DNA, 23 bp, synthetic construct
  source 1..23: mol_type = other DNA
gggggcgcccaccgccagccttg

SEQ ID NO: 3059 - DNA, 23 bp, synthetic construct
  source 1..23: mol_type = other DNA
tgggggcgcccaccgccagcctt

SEQ ID NO: 3060 - DNA, 23 bp, synthetic construct
  source 1..23: mol_type = other DNA
ctgggggcgcccaccgccagcct

SEQ ID NO: 3061 - DNA, 23 bp, synthetic construct
  source 1..23: mol_type = other DNA
gctgggggcgcccaccgccagcc

SEQ ID NO: 3062 - DNA, 23 bp, synthetic construct
  source 1..23: mol_type = other DNA
ggctgggggcgcccaccgccagc

SEQ ID NO: 3063 - DNA, 23 bp, synthetic construct
  source 1..23: mol_type = other DNA
tggctgggggcgcccaccgccag

SEQ ID NO: 3064 - DNA, 23 bp, synthetic construct
  source 1..23: mol_type = other DNA
ctggctgggggcgcccaccgcca

SEQ ID NO: 3065 - DNA, 23 bp, synthetic construct
  source 1..23: mol_type = other DNA
gctggctgggggcgcccaccgcc

SEQ ID NO: 3066 - DNA, 23 bp, synthetic construct
  source 1..23: mol_type = other DNA
cgctggctgggggcgcccaccgc

SEQ ID NO: 3067 - DNA, 23 bp, synthetic construct
  source 1..23: mol_type = other DNA
tcgctggctgggggcgcccaccg

SEQ ID NO: 3068 - DNA, 23 bp, synthetic construct
  source 1..23: mol_type = other DNA
ctcgctggctgggggcgcccacc

SEQ ID NO: 3069 - DNA, 23 bp, synthetic construct
  source 1..23: mol_type = other DNA
tctcgctggctgggggcgcccac

SEQ ID NO: 3070 - DNA, 23 bp, synthetic construct
  source 1..23: mol_type = other DNA
ctctcgctggctgggggcgccca

SEQ ID NO: 3071 - DNA, 23 bp, synthetic construct
  source 1..23: mol_type = other DNA
actctcgctggctgggggcgccc

SEQ ID NO: 3072 - DNA, 23 bp, synthetic construct
  source 1..23: mol_type = other DNA
gactctcgctggctgggggcgcc

SEQ ID NO: 3073 - DNA, 23 bp, synthetic construct
  source 1..23: mol_type = other DNA
ggactctcgctggctgggggcgc

SEQ ID NO: 3074 - DNA, 23 bp, synthetic construct
  source 1..23: mol_type = other DNA
aggactctcgctggctgggggcg

SEQ ID NO: 3075 - DNA, 23 bp, synthetic construct
  source 1..23: mol_type = other DNA
caggactctcgctggctgggggc

SEQ ID NO: 3076 - DNA, 23 bp, synthetic construct
  source 1..23: mol_type = other DNA
ccaggactctcgctggctggggg

SEQ ID NO: 3077 - DNA, 23 bp, synthetic construct
  source 1..23: mol_type = other DNA
gccaggactctcgctggctgggg

SEQ ID NO: 3078 - DNA, 23 bp, synthetic construct
  source 1..23: mol_type = other DNA
ggccaggactctcgctggctggg

SEQ ID NO: 3079 - DNA, 23 bp, synthetic construct
  source 1..23: mol_type = other DNA
gggccaggactctcgctggctgg

SEQ ID NO: 3080 - DNA, 23 bp, synthetic construct
  source 1..23: mol_type = other DNA
tgggccaggactctcgctggctg

SEQ ID NO: 3081 - DNA, 23 bp, synthetic construct
  source 1..23: mol_type = other DNA
ctgggccaggactctcgctggct

SEQ ID NO: 3082 - DNA, 23 bp, synthetic construct
  source 1..23: mol_type = other DNA
tctgggccaggactctcgctggc

SEQ ID NO: 3083 - DNA, 23 bp, synthetic construct
  source 1..23: mol_type = other DNA
gtctgggccaggactctcgctgg

SEQ ID NO: 3084 - DNA, 23 bp, synthetic construct
  source 1..23: mol_type = other DNA
ggtctgggccaggactctcgctg

SEQ ID NO: 3085 - DNA, 23 bp, synthetic construct
  source 1..23: mol_type = other DNA
cggtctgggccaggactctcgct

SEQ ID NO: 3086 - DNA, 23 bp, synthetic construct
  source 1..23: mol_type = other DNA
ccggtctgggccaggactctcgc

SEQ ID NO: 3087 - DNA, 23 bp, synthetic construct
  source 1..23: mol_type = other DNA
cccggtctgggccaggactctcg

SEQ ID NO: 3088 - DNA, 23 bp, synthetic construct
  source 1..23: mol_type = other DNA
gcccggtctgggccaggactctc

SEQ ID NO: 3089 - DNA, 23 bp, synthetic construct
  source 1..23: mol_type = other DNA
ggcccggtctgggccaggactct

SEQ ID NO: 3090 - DNA, 23 bp, synthetic construct
  source 1..23: mol_type = other DNA
gggcccggtctgggccaggactc

SEQ ID NO: 3091 - DNA, 23 bp, synthetic construct
  source 1..23: mol_type = other DNA
ggggcccggtctgggccaggact

SEQ ID NO: 3092 - DNA, 23 bp, synthetic construct
  source 1..23: mol_type = other DNA
tggggcccggtctgggccaggac

SEQ ID NO: 3093 - DNA, 23 bp, synthetic construct
  source 1..23: mol_type = other DNA
gtggggcccggtctgggccagga

SEQ ID NO: 3094 - DNA, 23 bp, synthetic construct
  source 1..23: mol_type = other DNA
ggtggggcccggtctgggccagg

SEQ ID NO: 3095 - DNA, 23 bp, synthetic construct
  source 1..23: mol_type = other DNA
gggtggggcccggtctgggccag

SEQ ID NO: 3096 - DNA, 23 bp, synthetic construct
  source 1..23: mol_type = other DNA
ggggtggggcccggtctgggcca

SEQ ID NO: 3097 - DNA, 23 bp, synthetic construct
  source 1..23: mol_type = other DNA
aggggtggggcccggtctgggcc

SEQ ID NO: 3098 - DNA, 23 bp, synthetic construct
  source 1..23: mol_type = other DNA
caggggtggggcccggtctgggc

SEQ ID NO: 3099 - DNA, 23 bp, synthetic construct
  source 1..23: mol_type = other DNA
gcaggggtggggcccggtctggg

SEQ ID NO: 3100 - DNA, 23 bp, synthetic construct
  source 1..23: mol_type = other DNA
ggcaggggtggggcccggtctgg

SEQ ID NO: 3101 - DNA, 23 bp, synthetic construct
  source 1..23: mol_type = other DNA
aggcaggggtggggcccggtctg

SEQ ID NO: 3102 - DNA, 23 bp, synthetic construct
  source 1..23: mol_type = other DNA
caggcaggggtggggcccggtct

SEQ ID NO: 3103 - DNA, 23 bp, synthetic construct
  source 1..23: mol_type = other DNA
ccaggcaggggtggggcccggtc

SEQ ID NO: 3104 - DNA, 23 bp, synthetic construct
  source 1..23: mol_type = other DNA
cccaggcaggggtggggcccggt

SEQ ID NO: 3105 - DNA, 23 bp, synthetic construct
  source 1..23: mol_type = other DNA
ccccaggcaggggtggggcccgg

SEQ ID NO: 3106 - DNA, 23 bp, synthetic construct
  source 1..23: mol_type = other DNA
accccaggcaggggtggggcccg

SEQ ID NO: 3107 - DNA, 23 bp, synthetic construct
  source 1..23: mol_type = other DNA
aaccccaggcaggggtggggccc

SEQ ID NO: 3108 - DNA, 23 bp, synthetic construct
  source 1..23: mol_type = other DNA
aaaccccaggcaggggtggggcc

SEQ ID NO: 3109 - DNA, 23 bp, synthetic construct
  source 1..23: mol_type = other DNA
caaaccccaggcaggggtggggc

SEQ ID NO: 3110 - DNA, 23 bp, synthetic construct
  source 1..23: mol_type = other DNA
gcaaaccccaggcaggggtgggg

SEQ ID NO: 3111 - DNA, 23 bp, synthetic construct
  source 1..23: mol_type = other DNA
agcaaaccccaggcaggggtggg

SEQ ID NO: 3112 - DNA, 23 bp, synthetic construct
  source 1..23: mol_type = other DNA
aagcaaaccccaggcaggggtgg

SEQ ID NO: 3113 - DNA, 23 bp, synthetic construct
  source 1..23: mol_type = other DNA
gaagcaaaccccaggcaggggtg

SEQ ID NO: 3114 - DNA, 23 bp, synthetic construct
  source 1..23: mol_type = other DNA
tgaagcaaaccccaggcaggggt

SEQ ID NO: 3115 - DNA, 23 bp, synthetic construct
  source 1..23: mol_type = other DNA
ttgaagcaaaccccaggcagggg

SEQ ID NO: 3116 - DNA, 23 bp, synthetic construct
  source 1..23: mol_type = other DNA
cttgaagcaaaccccaggcaggg

SEQ ID NO: 3117 - DNA, 23 bp, synthetic construct
  source 1..23: mol_type = other DNA
tcttgaagcaaaccccaggcagg

SEQ ID NO: 3118 - DNA, 23 bp, synthetic construct
  source 1..23: mol_type = other DNA
ctcttgaagcaaaccccaggcag

SEQ ID NO: 3119 - DNA, 23 bp, synthetic construct
  source 1..23: mol_type = other DNA
gctcttgaagcaaaccccaggca

SEQ ID NO: 3120 - DNA, 23 bp, synthetic construct
  source 1..23: mol_type = other DNA
ggctcttgaagcaaaccccaggc

SEQ ID NO: 3121 - DNA, 23 bp, synthetic construct
  source 1..23: mol_type = other DNA
gggctcttgaagcaaaccccagg

SEQ ID NO: 3122 - DNA, 23 bp, synthetic construct
  source 1..23: mol_type = other DNA
agggctcttgaagcaaaccccag

SEQ ID NO: 3123 - DNA, 23 bp, synthetic construct
  source 1..23: mol_type = other DNA
cagggctcttgaagcaaacccca

SEQ ID NO: 3124 - DNA, 23 bp, synthetic construct
  source 1..23: mol_type = other DNA
ccagggctcttgaagcaaacccc

SEQ ID NO: 3125 - DNA, 23 bp, synthetic construct
  source 1..23: mol_type = other DNA
cccagggctcttgaagcaaaccc

SEQ ID NO: 3126 - DNA, 23 bp, synthetic construct
  source 1..23: mol_type = other DNA
acccagggctcttgaagcaaacc

SEQ ID NO: 3127 - DNA, 23 bp, synthetic construct
  source 1..23: mol_type = other DNA
cacccagggctcttgaagcaaac

SEQ ID NO: 3128 - DNA, 23 bp, synthetic construct
  source 1..23: mol_type = other DNA
ccacccagggctcttgaagcaaa

SEQ ID NO: 3129 - DNA, 23 bp, synthetic construct
  source 1..23: mol_type = other DNA
tccacccagggctcttgaagcaa

SEQ ID NO: 3130 - DNA, 23 bp, synthetic construct
  source 1..23: mol_type = other DNA
ctccacccagggctcttgaagca

SEQ ID NO: 3131 - DNA, 23 bp, synthetic construct
  source 1..23: mol_type = other DNA
cctccacccagggctcttgaagc

SEQ ID NO: 3132 - DNA, 23 bp, synthetic construct
  source 1..23: mol_type = other DNA
ccctccacccagggctcttgaag

SEQ ID NO: 3133 - DNA, 23 bp, synthetic construct
  source 1..23: mol_type = other DNA
tccctccacccagggctcttgaa

SEQ ID NO: 3134 - DNA, 23 bp, synthetic construct
  source 1..23: mol_type = other DNA
atccctccacccagggctcttga

SEQ ID NO: 3135 - DNA, 23 bp, synthetic construct
  source 1..23: mol_type = other DNA
catccctccacccagggctcttg

SEQ ID NO: 3136 - DNA, 23 bp, synthetic construct
  source 1..23: mol_type = other DNA
ccatccctccacccagggctctt

SEQ ID NO: 3137 - DNA, 23 bp, synthetic construct
  source 1..23: mol_type = other DNA
tccatccctccacccagggctct

SEQ ID NO: 3138 - DNA, 23 bp, synthetic construct
  source 1..23: mol_type = other DNA
ctccatccctccacccagggctc

SEQ ID NO: 3139 - DNA, 23 bp, synthetic construct
  source 1..23: mol_type = other DNA
actccatccctccacccagggct

SEQ ID NO: 3140 - DNA, 23 bp, synthetic construct
  source 1..23: mol_type = other DNA
gactccatccctccacccagggc

SEQ ID NO: 3141 - DNA, 23 bp, synthetic construct
  source 1..23: mol_type = other DNA
tgactccatccctccacccaggg

SEQ ID NO: 3142 - DNA, 23 bp, synthetic construct
  source 1..23: mol_type = other DNA
ctgactccatccctccacccagg

SEQ ID NO: 3143 - DNA, 23 bp, synthetic construct
  source 1..23: mol_type = other DNA
actgactccatccctccacccag

SEQ ID NO: 3144 - DNA, 23 bp, synthetic construct
  source 1..23: mol_type = other DNA
cactgactccatccctccaccca

SEQ ID NO: 3145 - DNA, 23 bp, synthetic construct
  source 1..23: mol_type = other DNA
ccactgactccatccctccaccc

SEQ ID NO: 3146 - DNA, 23 bp, synthetic construct
  source 1..23: mol_type = other DNA
accactgactccatccctccacc

SEQ ID NO: 3147 - DNA, 23 bp, synthetic construct
  source 1..23: mol_type = other DNA
caccactgactccatccctccac

SEQ ID NO: 3148 - DNA, 23 bp, synthetic construct
  source 1..23: mol_type = other DNA
ccaccactgactccatccctcca

SEQ ID NO: 3149 - DNA, 23 bp, synthetic construct
  source 1..23: mol_type = other DNA
gccaccactgactccatccctcc

SEQ ID NO: 3150 - DNA, 23 bp, synthetic construct
  source 1..23: mol_type = other DNA
agccaccactgactccatccctc

SEQ ID NO: 3151 - DNA, 23 bp, synthetic construct
  source 1..23: mol_type = other DNA
gagccaccactgactccatccct

SEQ ID NO: 3152 - DNA, 23 bp, synthetic construct
  source 1..23: mol_type = other DNA
agagccaccactgactccatccc

SEQ ID NO: 3153 - DNA, 23 bp, synthetic construct
  source 1..23: mol_type = other DNA
cagagccaccactgactccatcc

SEQ ID NO: 3154 - DNA, 23 bp, synthetic construct
  source 1..23: mol_type = other DNA
ccagagccaccactgactccatc

SEQ ID NO: 3155 - DNA, 23 bp, synthetic construct
  source 1..23: mol_type = other DNA
gccagagccaccactgactccat

SEQ ID NO: 3156 - DNA, 23 bp, synthetic construct
  source 1..23: mol_type = other DNA
agccagagccaccactgactcca

SEQ ID NO: 3157 - DNA, 23 bp, synthetic construct
  source 1..23: mol_type = other DNA
cagccagagccaccactgactcc

SEQ ID NO: 3158 - DNA, 23 bp, synthetic construct
  source 1..23: mol_type = other DNA
ccagccagagccaccactgactc

SEQ ID NO: 3159 - DNA, 23 bp, synthetic construct
  source 1..23: mol_type = other DNA
tccagccagagccaccactgact

SEQ ID NO: 3160 - DNA, 23 bp, synthetic construct
  source 1..23: mol_type = other DNA
ctccagccagagccaccactgac

SEQ ID NO: 3161 - DNA, 23 bp, synthetic construct
  source 1..23: mol_type = other DNA
gctccagccagagccaccactga

SEQ ID NO: 3162 - DNA, 23 bp, synthetic construct
  source 1..23: mol_type = other DNA
ggctccagccagagccaccactg

SEQ ID NO: 3163 - DNA, 23 bp, synthetic construct
  source 1..23: mol_type = other DNA
gggctccagccagagccaccact

SEQ ID NO: 3164 - DNA, 23 bp, synthetic construct
  source 1..23: mol_type = other DNA
tgggctccagccagagccaccac

SEQ ID NO: 3165 - DNA, 23 bp, synthetic construct
  source 1..23: mol_type = other DNA
atgggctccagccagagccacca

SEQ ID NO: 3166 - DNA, 23 bp, synthetic construct
  source 1..23: mol_type = other DNA
gatgggctccagccagagccacc

SEQ ID NO: 3167 - DNA, 23 bp, synthetic construct
  source 1..23: mol_type = other DNA
tgatgggctccagccagagccac

SEQ ID NO: 3168 - DNA, 23 bp, synthetic construct
  source 1..23: mol_type = other DNA
ctgatgggctccagccagagcca

SEQ ID NO: 3169 - DNA, 23 bp, synthetic construct
  source 1..23: mol_type = other DNA
cctgatgggctccagccagagcc

SEQ ID NO: 3170 - DNA, 23 bp, synthetic construct
  source 1..23: mol_type = other DNA
acctgatgggctccagccagagc

SEQ ID NO: 3171 - DNA, 23 bp, synthetic construct
  source 1..23: mol_type = other DNA
cacctgatgggctccagccagag

SEQ ID NO: 3172 - DNA, 23 bp, synthetic construct
  source 1..23: mol_type = other DNA
acacctgatgggctccagccaga

SEQ ID NO: 3173 - DNA, 23 bp, synthetic construct
  source 1..23: mol_type = other DNA
cacacctgatgggctccagccag

SEQ ID NO: 3174 - DNA, 23 bp, synthetic construct
  source 1..23: mol_type = other DNA
tcacacctgatgggctccagcca

SEQ ID NO: 3175 - DNA, 23 bp, synthetic construct
  source 1..23: mol_type = other DNA
ttcacacctgatgggctccagcc

SEQ ID NO: 3176 - DNA, 23 bp, synthetic construct
  source 1..23: mol_type = other DNA
gttcacacctgatgggctccagc

SEQ ID NO: 3177 - DNA, 23 bp, synthetic construct
  source 1..23: mol_type = other DNA
cgttcacacctgatgggctccag

SEQ ID NO: 3178 - DNA, 23 bp, synthetic construct
  source 1..23: mol_type = other DNA
tcgttcacacctgatgggctcca

SEQ ID NO: 3179 - DNA, 23 bp, synthetic construct
  source 1..23: mol_type = other DNA
ctcgttcacacctgatgggctcc

SEQ ID NO: 3180 - DNA, 23 bp, synthetic construct
  source 1..23: mol_type = other DNA
gctcgttcacacctgatgggctc

SEQ ID NO: 3181 - DNA, 23 bp, synthetic construct
  source 1..23: mol_type = other DNA
ggctcgttcacacctgatgggct

SEQ ID NO: 3182 - DNA, 23 bp, synthetic construct
  source 1..23: mol_type = other DNA
aggctcgttcacacctgatgggc

SEQ ID NO: 3183 - DNA, 23 bp, synthetic construct
  source 1..23: mol_type = other DNA
gaggctcgttcacacctgatggg

SEQ ID NO: 3184 - DNA, 23 bp, synthetic construct
  source 1..23: mol_type = other DNA
ggaggctcgttcacacctgatgg

SEQ ID NO: 3185 - DNA, 23 bp, synthetic construct
  source 1..23: mol_type = other DNA
gggaggctcgttcacacctgatg

SEQ ID NO: 3186 - DNA, 23 bp, synthetic construct
  source 1..23: mol_type = other DNA
agggaggctcgttcacacctgat

SEQ ID NO: 3187 - DNA, 23 bp, synthetic construct
  source 1..23: mol_type = other DNA
gagggaggctcgttcacacctga

SEQ ID NO: 3188 - DNA, 23 bp, synthetic construct
  source 1..23: mol_type = other DNA
ggagggaggctcgttcacacctg

SEQ ID NO: 3189 - DNA, 23 bp, synthetic construct
  source 1..23: mol_type = other DNA
gggagggaggctcgttcacacct

SEQ ID NO: 3190 - DNA, 23 bp, synthetic construct
  source 1..23: mol_type = other DNA
ggggagggaggctcgttcacacc

SEQ ID NO: 3191 - DNA, 23 bp, synthetic construct
  source 1..23: mol_type = other DNA
aggggagggaggctcgttcacac

SEQ ID NO: 3192 - DNA, 23 bp, synthetic construct
  source 1..23: mol_type = other DNA
aaggggagggaggctcgttcaca

SEQ ID NO: 3193 - DNA, 23 bp, synthetic construct
  source 1..23: mol_type = other DNA
aaaggggagggaggctcgttcac

SEQ ID NO: 3194 - DNA, 23 bp, synthetic construct
  source 1..23: mol_type = other DNA
gaaaggggagggaggctcgttca

SEQ ID NO: 3195 - DNA, 23 bp, synthetic construct
  source 1..23: mol_type = other DNA
agaaaggggagggaggctcgttc

SEQ ID NO: 3196 - DNA, 23 bp, synthetic construct
  source 1..23: mol_type = other DNA
aagaaaggggagggaggctcgtt

SEQ ID NO: 3197 - DNA, 23 bp, synthetic construct
  source 1..23: mol_type = other DNA
gaagaaaggggagggaggctcgt

SEQ ID NO: 3198 - DNA, 23 bp, synthetic construct
  source 1..23: mol_type = other DNA
agaagaaaggggagggaggctcg

SEQ ID NO: 3199 - DNA, 23 bp, synthetic construct
  source 1..23: mol_type = other DNA
gagaagaaaggggagggaggctc

SEQ ID NO: 3200 - DNA, 23 bp, synthetic construct
  source 1..23: mol_type = other DNA
cgagaagaaaggggagggaggct

SEQ ID NO: 3201 - DNA, 23 bp, synthetic construct
  source 1..23: mol_type = other DNA
ccgagaagaaaggggagggaggc

SEQ ID NO: 3202 - DNA, 23 bp, synthetic construct
  source 1..23: mol_type = other DNA
accgagaagaaaggggagggagg

SEQ ID NO: 3203 - DNA, 23 bp, synthetic construct
  source 1..23: mol_type = other DNA
caccgagaagaaaggggagggag

SEQ ID NO: 3204 - DNA, 23 bp, synthetic construct
  source 1..23: mol_type = other DNA
gcaccgagaagaaaggggaggga

SEQ ID NO: 3205 - DNA, 23 bp, synthetic construct
  source 1..23: mol_type = other DNA
agcaccgagaagaaaggggaggg

SEQ ID NO: 3206 - DNA, 23 bp, synthetic construct
  source 1..23: mol_type = other DNA
aagcaccgagaagaaaggggagg

SEQ ID NO: 3207 - DNA, 23 bp, synthetic construct
  source 1..23: mol_type = other DNA
gaagcaccgagaagaaaggggag

SEQ ID NO: 3208 - DNA, 23 bp, synthetic construct
  source 1..23: mol_type = other DNA
agaagcaccgagaagaaagggga

SEQ ID NO: 3209 - DNA, 23 bp, synthetic construct
  source 1..23: mol_type = other DNA
aagaagcaccgagaagaaagggg

SEQ ID NO: 3210 - DNA, 23 bp, synthetic construct
  source 1..23: mol_type = other DNA
gaagaagcaccgagaagaaaggg

SEQ ID NO: 3211 - DNA, 23 bp, synthetic construct
  source 1..23: mol_type = other DNA
agaagaagcaccgagaagaaagg

SEQ ID NO: 3212 - DNA, 23 bp, synthetic construct
  source 1..23: mol_type = other DNA
gagaagaagcaccgagaagaaag

SEQ ID NO: 3213 - DNA, 23 bp, synthetic construct
  source 1..23: mol_type = other DNA
cgagaagaagcaccgagaagaaa

SEQ ID NO: 3214 - DNA, 23 bp, synthetic construct
  source 1..23: mol_type = other DNA
acgagaagaagcaccgagaagaa

SEQ ID NO: 3215 - DNA, 23 bp, synthetic construct
  source 1..23: mol_type = other DNA
cacgagaagaagcaccgagaaga

SEQ ID NO: 3216 - DNA, 23 bp, synthetic construct
  source 1..23: mol_type = other DNA
tcacgagaagaagcaccgagaag

SEQ ID NO: 3217 - DNA, 23 bp, synthetic construct
  source 1..23: mol_type = other DNA
gtcacgagaagaagcaccgagaa

SEQ ID NO: 3218 - DNA, 23 bp, synthetic construct
  source 1..23: mol_type = other DNA
agtcacgagaagaagcaccgaga

SEQ ID NO: 3219 - DNA, 23 bp, synthetic construct
  source 1..23: mol_type = other DNA
aagtcacgagaagaagcaccgag

SEQ ID NO: 3220 - DNA, 23 bp, synthetic construct
  source 1..23: mol_type = other DNA
caagtcacgagaagaagcaccga

SEQ ID NO: 3221 - DNA, 23 bp, synthetic construct
  source 1..23: mol_type = other DNA
ccaagtcacgagaagaagcaccg

SEQ ID NO: 3222 - DNA, 23 bp, Homo sapiens
  source 1..23: mol_type = genomic DNA
gagtcacggccccaaggctggcg

SEQ ID NO: 3223 - DNA, 23 bp, Homo sapiens
  source 1..23: mol_type = genomic DNA
agtcacggccccaaggctggcgg

SEQ ID NO: 3224 - DNA, 23 bp, Homo sapiens
  source 1..23: mol_type = genomic DNA
gtcacggccccaaggctggcggt

SEQ ID NO: 3225 - DNA, 23 bp, Homo sapiens
  source 1..23: mol_type = genomic DNA
tcacggccccaaggctggcggtg

SEQ ID NO: 3226 - DNA, 23 bp, Homo sapiens
  source 1..23: mol_type = genomic DNA
cacggccccaaggctggcggtgg

SEQ ID NO: 3227 - DNA, 23 bp, Homo sapiens
  source 1..23: mol_type = genomic DNA
acggccccaaggctggcggtggg

SEQ ID NO: 3228 - DNA, 23 bp, Homo sapiens
  source 1..23: mol_type = genomic DNA
cggccccaaggctggcggtgggc

SEQ ID NO: 3229 - DNA, 23 bp, Homo sapiens
  source 1..23: mol_type = genomic DNA
ggccccaaggctggcggtgggcg

SEQ ID NO: 3230 - DNA, 23 bp, Homo sapiens
  source 1..23: mol_type = genomic DNA
gccccaaggctggcggtgggcgc

SEQ ID NO: 3231 - DNA, 23 bp, Homo sapiens
  source 1..23: mol_type = genomic DNA
ccccaaggctggcggtgggcgcc

SEQ ID NO: 3232 - DNA, 23 bp, Homo sapiens
  source 1..23: mol_type = genomic DNA
cccaaggctggcggtgggcgccc

SEQ ID NO: 3233 - DNA, 23 bp, Homo sapiens
  source 1..23: mol_type = genomic DNA
ccaaggctggcggtgggcgcccc

SEQ ID NO: 3234 - DNA, 23 bp, Homo sapiens
  source 1..23: mol_type = genomic DNA
caaggctggcggtgggcgccccc

SEQ ID NO: 3235 - DNA, 23 bp, Homo sapiens
  source 1..23: mol_type = genomic DNA
aaggctggcggtgggcgccccca

SEQ ID NO: 3236 - DNA, 23 bp, Homo sapiens
  source 1..23: mol_type = genomic DNA
aggctggcggtgggcgcccccag

SEQ ID NO: 3237 - DNA, 23 bp, Homo sapiens
  source 1..23: mol_type = genomic DNA
ggctggcggtgggcgcccccagc

SEQ ID NO: 3238 - DNA, 23 bp, Homo sapiens
  source 1..23: mol_type = genomic DNA
gctggcggtgggcgcccccagcc

SEQ ID NO: 3239 - DNA, 23 bp, Homo sapiens
  source 1..23: mol_type = genomic DNA
ctggcggtgggcgcccccagcca

SEQ ID NO: 3240 - DNA, 23 bp, Homo sapiens
  source 1..23: mol_type = genomic DNA
tggcggtgggcgcccccagccag

SEQ ID NO: 3241 - DNA, 23 bp, Homo sapiens
  source 1..23: mol_type = genomic DNA
ggcggtgggcgcccccagccagc

SEQ ID NO: 3242 - DNA, 23 bp, Homo sapiens
  source 1..23: mol_type = genomic DNA
gcggtgggcgcccccagccagcg

SEQ ID NO: 3243 - DNA, 23 bp, Homo sapiens
  source 1..23: mol_type = genomic DNA
cggtgggcgcccccagccagcga

SEQ ID NO: 3244 - DNA, 23 bp, Homo sapiens
  source 1..23: mol_type = genomic DNA
ggtgggcgcccccagccagcgag

SEQ ID NO: 3245 - DNA, 23 bp, Homo sapiens
  source 1..23: mol_type = genomic DNA
gtgggcgcccccagccagcgaga

SEQ ID NO: 3246 - DNA, 23 bp, Homo sapiens
  source 1..23: mol_type = genomic DNA
tgggcgcccccagccagcgagag

SEQ ID NO: 3247 - DNA, 23 bp, Homo sapiens
  source 1..23: mol_type = genomic DNA
gggcgcccccagccagcgagagt

SEQ ID NO: 3248 - DNA, 23 bp, Homo sapiens
  source 1..23: mol_type = genomic DNA
ggcgcccccagccagcgagagtc

SEQ ID NO: 3249 - DNA, 23 bp, Homo sapiens
  source 1..23: mol_type = genomic DNA
gcgcccccagccagcgagagtcc

SEQ ID NO: 3250 - DNA, 23 bp, Homo sapiens
  source 1..23: mol_type = genomic DNA
cgcccccagccagcgagagtcct

SEQ ID NO: 3251 - DNA, 23 bp, Homo sapiens
  source 1..23: mol_type = genomic DNA
gcccccagccagcgagagtcctg

SEQ ID NO: 3252 - DNA, 23 bp, Homo sapiens
  source 1..23: mol_type = genomic DNA
cccccagccagcgagagtcctgg

SEQ ID NO: 3253 - DNA, 23 bp, Homo sapiens
  source 1..23: mol_type = genomic DNA
ccccagccagcgagagtcctggc

SEQ ID NO: 3254 - DNA, 23 bp, Homo sapiens
  source 1..23: mol_type = genomic DNA
cccagccagcgagagtcctggcc

SEQ ID NO: 3255 - DNA, 23 bp, Homo sapiens
  source 1..23: mol_type = genomic DNA
ccagccagcgagagtcctggccc

SEQ ID NO: 3256 - DNA, 23 bp, Homo sapiens
  source 1..23: mol_type = genomic DNA
cagccagcgagagtcctggccca

SEQ ID NO: 3257 - DNA, 23 bp, Homo sapiens
  source 1..23: mol_type = genomic DNA
agccagcgagagtcctggcccag

SEQ ID NO: 3258 - DNA, 23 bp, Homo sapiens
  source 1..23: mol_type = genomic DNA
gccagcgagagtcctggcccaga

SEQ ID NO: 3259 - DNA, 23 bp, Homo sapiens
  source 1..23: mol_type = genomic DNA
ccagcgagagtcctggcccagac

SEQ ID NO: 3260 - DNA, 23 bp, Homo sapiens
  source 1..23: mol_type = genomic DNA
cagcgagagtcctggcccagacc

SEQ ID NO: 3261 - DNA, 23 bp, Homo sapiens
  source 1..23: mol_type = genomic DNA
agcgagagtcctggcccagaccg

SEQ ID NO: 3262 - DNA, 23 bp, Homo sapiens
  source 1..23: mol_type = genomic DNA
gcgagagtcctggcccagaccgg

SEQ ID NO: 3263 - DNA, 23 bp, Homo sapiens
  source 1..23: mol_type = genomic DNA
cgagagtcctggcccagaccggg

SEQ ID NO: 3264 - DNA, 23 bp, Homo sapiens
  source 1..23: mol_type = genomic DNA
gagagtcctggcccagaccgggc

SEQ ID NO: 3265 - DNA, 23 bp, Homo sapiens
  source 1..23: mol_type = genomic DNA
agagtcctggcccagaccgggcc

SEQ ID NO: 3266 - DNA, 23 bp, Homo sapiens
  source 1..23: mol_type = genomic DNA
gagtcctggcccagaccgggccc

SEQ ID NO: 3267 - DNA, 23 bp, Homo sapiens
  source 1..23: mol_type = genomic DNA
agtcctggcccagaccgggcccc

SEQ ID NO: 3268 - DNA, 23 bp, Homo sapiens
  source 1..23: mol_type = genomic DNA
gtcctggcccagaccgggcccca

SEQ ID NO: 3269 - DNA, 23 bp, Homo sapiens
  source 1..23: mol_type = genomic DNA
tcctggcccagaccgggccccac

SEQ ID NO: 3270 - DNA, 23 bp, Homo sapiens
  source 1..23: mol_type = genomic DNA
cctggcccagaccgggccccacc

SEQ ID NO: 3271 - DNA, 23 bp, Homo sapiens
  source 1..23: mol_type = genomic DNA
ctggcccagaccgggccccaccc

SEQ ID NO: 3272 - DNA, 23 bp, Homo sapiens
  source 1..23: mol_type = genomic DNA
tggcccagaccgggccccacccc

SEQ ID NO: 3273 - DNA, 23 bp, Homo sapiens
  source 1..23: mol_type = genomic DNA
ggcccagaccgggccccacccct

SEQ ID NO: 3274 - DNA, 23 bp, Homo sapiens
  source 1..23: mol_type = genomic DNA
gcccagaccgggccccacccctg

SEQ ID NO: 3275 - DNA, 23 bp, Homo sapiens
  source 1..23: mol_type = genomic DNA
cccagaccgggccccacccctgc

SEQ ID NO: 3276 - DNA, 23 bp, Homo sapiens
  source 1..23: mol_type = genomic DNA
ccagaccgggccccacccctgcc

SEQ ID NO: 3277 - DNA, 23 bp, Homo sapiens
  source 1..23: mol_type = genomic DNA
cagaccgggccccacccctgcct

SEQ ID NO: 3278 - DNA, 23 bp, Homo sapiens
  source 1..23: mol_type = genomic DNA
agaccgggccccacccctgcctg

SEQ ID NO: 3279 - DNA, 23 bp, Homo sapiens
  source 1..23: mol_type = genomic DNA
gaccgggccccacccctgcctgg

SEQ ID NO: 3280 - DNA, 23 bp, Homo sapiens
  source 1..23: mol_type = genomic DNA
accgggccccacccctgcctggg

SEQ ID NO: 3281 - DNA, 23 bp, Homo sapiens
  source 1..23: mol_type = genomic DNA
ccgggccccacccctgcctgggg

SEQ ID NO: 3282 - DNA, 23 bp, Homo sapiens
  source 1..23: mol_type = genomic DNA
cgggccccacccctgcctggggt

SEQ ID NO: 3283 - DNA, 23 bp, Homo sapiens
  source 1..23: mol_type = genomic DNA
gggccccacccctgcctggggtt

SEQ ID NO: 3284 - DNA, 23 bp, Homo sapiens
  source 1..23: mol_type = genomic DNA
ggccccacccctgcctggggttt

SEQ ID NO: 3285 - DNA, 23 bp, Homo sapiens
  source 1..23: mol_type = genomic DNA
gccccacccctgcctggggtttg

SEQ ID NO: 3286 - DNA, 23 bp, Homo sapiens
  source 1..23: mol_type = genomic DNA
ccccacccctgcctggggtttgc

SEQ ID NO: 3287 - DNA, 23 bp, Homo sapiens
  source 1..23: mol_type = genomic DNA
cccacccctgcctggggtttgct

SEQ ID NO: 3288 - DNA, 23 bp, Homo sapiens
  source 1..23: mol_type = genomic DNA
ccacccctgcctggggtttgctt

SEQ ID NO: 3289 - DNA, 23 bp, Homo sapiens
  source 1..23: mol_type = genomic DNA
cacccctgcctggggtttgcttc

SEQ ID NO: 3290 - DNA, 23 bp, Homo sapiens
  source 1..23: mol_type = genomic DNA
acccctgcctggggtttgcttca

SEQ ID NO: 3291 - DNA, 23 bp, Homo sapiens
  source 1..23: mol_type = genomic DNA
cccctgcctggggtttgcttcaa

SEQ ID NO: 3292 - DNA, 23 bp, Homo sapiens
  source 1..23: mol_type = genomic DNA
ccctgcctggggtttgcttcaag

SEQ ID NO: 3293 - DNA, 23 bp, Homo sapiens
  source 1..23: mol_type = genomic DNA
cctgcctggggtttgcttcaaga

SEQ ID NO: 3294 - DNA, 23 bp, Homo sapiens
  source 1..23: mol_type = genomic DNA
ctgcctggggtttgcttcaagag

SEQ ID NO: 3295 - DNA, 23 bp, Homo sapiens
  source 1..23: mol_type = genomic DNA
tgcctggggtttgcttcaagagc

SEQ ID NO: 3296 - DNA, 23 bp, Homo sapiens
  source 1..23: mol_type = genomic DNA
gcctggggtttgcttcaagagcc

SEQ ID NO: 3297 - DNA, 23 bp, Homo sapiens
  source 1..23: mol_type = genomic DNA
cctggggtttgcttcaagagccc

SEQ ID NO: 3298 - DNA, 23 bp, Homo sapiens
  source 1..23: mol_type = genomic DNA
ctggggtttgcttcaagagccct

SEQ ID NO: 3299 - DNA, 23 bp, Homo sapiens
  source 1..23: mol_type = genomic DNA
tggggtttgcttcaagagccctg

SEQ ID NO: 3300 - DNA, 23 bp, Homo sapiens
  source 1..23: mol_type = genomic DNA
ggggtttgcttcaagagccctgg

SEQ ID NO: 3301 - DNA, 23 bp, Homo sapiens
  source 1..23: mol_type = genomic DNA
gggtttgcttcaagagccctggg

SEQ ID NO: 3302 - DNA, 23 bp, Homo sapiens
  source 1..23: mol_type = genomic DNA
ggtttgcttcaagagccctgggt

SEQ ID NO: 3303 - DNA, 23 bp, Homo sapiens
  source 1..23: mol_type = genomic DNA
gtttgcttcaagagccctgggtg

SEQ ID NO: 3304 - DNA, 23 bp, Homo sapiens
  source 1..23: mol_type = genomic DNA
tttgcttcaagagccctgggtgg

SEQ ID NO: 3305 - DNA, 23 bp, Homo sapiens
  source 1..23: mol_type = genomic DNA
ttgcttcaagagccctgggtgga

SEQ ID NO: 3306 - DNA, 23 bp, Homo sapiens
  source 1..23: mol_type = genomic DNA
tgcttcaagagccctgggtggag

SEQ ID NO: 3307 - DNA, 23 bp, Homo sapiens
  source 1..23: mol_type = genomic DNA
gcttcaagagccctgggtggagg

SEQ ID NO: 3308 - DNA, 23 bp, Homo sapiens
  source 1..23: mol_type = genomic DNA
cttcaagagccctgggtggaggg

SEQ ID NO: 3309 - DNA, 23 bp, Homo sapiens
  source 1..23: mol_type = genomic DNA
ttcaagagccctgggtggaggga

SEQ ID NO: 3310 - DNA, 23 bp, Homo sapiens
  source 1..23: mol_type = genomic DNA
tcaagagccctgggtggagggat

SEQ ID NO: 3311 - DNA, 23 bp, Homo sapiens
  source 1..23: mol_type = genomic DNA
caagagccctgggtggagggatg

SEQ ID NO: 3312 - DNA, 23 bp, Homo sapiens
  source 1..23: mol_type = genomic DNA
aagagccctgggtggagggatgg

SEQ ID NO: 3313 - DNA, 23 bp, Homo sapiens
  source 1..23: mol_type = genomic DNA
agagccctgggtggagggatgga

SEQ ID NO: 3314 - DNA, 23 bp, Homo sapiens
  source 1..23: mol_type = genomic DNA
gagccctgggtggagggatggag

SEQ ID NO: 3315 - DNA, 23 bp, Homo sapiens
  source 1..23: mol_type = genomic DNA
agccctgggtggagggatggagt

SEQ ID NO: 3316 - DNA, 23 bp, Homo sapiens
  source 1..23: mol_type = genomic DNA
gccctgggtggagggatggagtc

SEQ ID NO: 3317 - DNA, 23 bp, Homo sapiens
  source 1..23: mol_type = genomic DNA
ccctgggtggagggatggagtca

SEQ ID NO: 3318 - DNA, 23 bp, Homo sapiens
  source 1..23: mol_type = genomic DNA
cctgggtggagggatggagtcag

SEQ ID NO: 3319 - DNA, 23 bp, Homo sapiens
  source 1..23: mol_type = genomic DNA
ctgggtggagggatggagtcagt

SEQ ID NO: 3320 - DNA, 23 bp, Homo sapiens
  source 1..23: mol_type = genomic DNA
tgggtggagggatggagtcagtg

SEQ ID NO: 3321 - DNA, 23 bp, Homo sapiens
  source 1..23: mol_type = genomic DNA
gggtggagggatggagtcagtgg

SEQ ID NO: 3322 - DNA, 23 bp, Homo sapiens
  source 1..23: mol_type = genomic DNA
ggtggagggatggagtcagtggt

SEQ ID NO: 3323 - DNA, 23 bp, Homo sapiens
  source 1..23: mol_type = genomic DNA
gtggagggatggagtcagtggtg

SEQ ID NO: 3324 - DNA, 23 bp, Homo sapiens
  source 1..23: mol_type = genomic DNA
tggagggatggagtcagtggtgg

SEQ ID NO: 3325 - DNA, 23 bp, Homo sapiens
  source 1..23: mol_type = genomic DNA
ggagggatggagtcagtggtggc

SEQ ID NO: 3326 - DNA, 23 bp, Homo sapiens
  source 1..23: mol_type = genomic DNA
gagggatggagtcagtggtggct

SEQ ID NO: 3327 - DNA, 23 bp, Homo sapiens
  source 1..23: mol_type = genomic DNA
agggatggagtcagtggtggctc

SEQ ID NO: 3328 - DNA, 23 bp, Homo sapiens
  source 1..23: mol_type = genomic DNA
gggatggagtcagtggtggctct

SEQ ID NO: 3329 - DNA, 23 bp, Homo sapiens
  source 1..23: mol_type = genomic DNA
ggatggagtcagtggtggctctg

SEQ ID NO: 3330 - DNA, 23 bp, Homo sapiens
  source 1..23: mol_type = genomic DNA
gatggagtcagtggtggctctgg

SEQ ID NO: 3331 - DNA, 23 bp, Homo sapiens
  source 1..23: mol_type = genomic DNA
atggagtcagtggtggctctggc

SEQ ID NO: 3332 - DNA, 23 bp, Homo sapiens
  source 1..23: mol_type = genomic DNA
tggagtcagtggtggctctggct

SEQ ID NO: 3333 - DNA, 23 bp, Homo sapiens
  source 1..23: mol_type = genomic DNA
ggagtcagtggtggctctggctg

SEQ ID NO: 3334 - DNA, 23 bp, Homo sapiens
  source 1..23: mol_type = genomic DNA
gagtcagtggtggctctggctgg

SEQ ID NO: 3335 - DNA, 23 bp, Homo sapiens
  source 1..23: mol_type = genomic DNA
agtcagtggtggctctggctgga

SEQ ID NO: 3336 - DNA, 23 bp, Homo sapiens
  source 1..23: mol_type = genomic DNA
gtcagtggtggctctggctggag

SEQ ID NO: 3337 - DNA, 23 bp, Homo sapiens
  source 1..23: mol_type = genomic DNA
tcagtggtggctctggctggagc

SEQ ID NO: 3338 - DNA, 23 bp, Homo sapiens
  source 1..23: mol_type = genomic DNA
cagtggtggctctggctggagcc

SEQ ID NO: 3339 - DNA, 23 bp, Homo sapiens
  source 1..23: mol_type = genomic DNA
agtggtggctctggctggagccc

SEQ ID NO: 3340 - DNA, 23 bp, Homo sapiens
  source 1..23: mol_type = genomic DNA
gtggtggctctggctggagccca

SEQ ID NO: 3341 - DNA, 23 bp, Homo sapiens
  source 1..23: mol_type = genomic DNA
tggtggctctggctggagcccat

SEQ ID NO: 3342 - DNA, 23 bp, Homo sapiens
  source 1..23: mol_type = genomic DNA
ggtggctctggctggagcccatc

SEQ ID NO: 3343 - DNA, 23 bp, Homo sapiens
  source 1..23: mol_type = genomic DNA
gtggctctggctggagcccatca

SEQ ID NO: 3344 - DNA, 23 bp, Homo sapiens
  source 1..23: mol_type = genomic DNA
tggctctggctggagcccatcag

SEQ ID NO: 3345 - DNA, 23 bp, Homo sapiens
  source 1..23: mol_type = genomic DNA
ggctctggctggagcccatcagg

SEQ ID NO: 3346 - DNA, 23 bp, Homo sapiens
  source 1..23: mol_type = genomic DNA
gctctggctggagcccatcaggt

SEQ ID NO: 3347 - DNA, 23 bp, Homo sapiens
  source 1..23: mol_type = genomic DNA
ctctggctggagcccatcaggtg

SEQ ID NO: 3348 - DNA, 23 bp, Homo sapiens
  source 1..23: mol_type = genomic DNA
tctggctggagcccatcaggtgt

SEQ ID NO: 3349 - DNA, 23 bp, Homo sapiens
  source 1..23: mol_type = genomic DNA
ctggctggagcccatcaggtgtg

SEQ ID NO: 3350 - DNA, 23 bp, Homo sapiens
  source 1..23: mol_type = genomic DNA
tggctggagcccatcaggtgtga

SEQ ID NO: 3351 - DNA, 23 bp, Homo sapiens
  source 1..23: mol_type = genomic DNA
ggctggagcccatcaggtgtgaa

SEQ ID NO: 3352 - DNA, 23 bp, Homo sapiens
  source 1..23: mol_type = genomic DNA
gctggagcccatcaggtgtgaac

SEQ ID NO: 3353 - DNA, 23 bp, Homo sapiens
  source 1..23: mol_type = genomic DNA
ctggagcccatcaggtgtgaacg

SEQ ID NO: 3354 - DNA, 23 bp, Homo sapiens
  source 1..23: mol_type = genomic DNA
tggagcccatcaggtgtgaacga

SEQ ID NO: 3355 - DNA, 23 bp, Homo sapiens
  source 1..23: mol_type = genomic DNA
ggagcccatcaggtgtgaacgag

SEQ ID NO: 3356 - DNA, 23 bp, Homo sapiens
  source 1..23: mol_type = genomic DNA
gagcccatcaggtgtgaacgagc

SEQ ID NO: 3357 - DNA, 23 bp, Homo sapiens
  source 1..23: mol_type = genomic DNA
agcccatcaggtgtgaacgagcc

SEQ ID NO: 3358 - DNA, 23 bp, Homo sapiens
  source 1..23: mol_type = genomic DNA
gcccatcaggtgtgaacgagcct

SEQ ID NO: 3359 - DNA, 23 bp, Homo sapiens
  source 1..23: mol_type = genomic DNA
cccatcaggtgtgaacgagcctc

SEQ ID NO: 3360 - DNA, 23 bp, Homo sapiens
  source 1..23: mol_type = genomic DNA
ccatcaggtgtgaacgagcctcc

SEQ ID NO: 3361 - DNA, 23 bp, Homo sapiens
  source 1..23: mol_type = genomic DNA
catcaggtgtgaacgagcctccc

SEQ ID NO: 3362 - DNA, 23 bp, Homo sapiens
  source 1..23: mol_type = genomic DNA
atcaggtgtgaacgagcctccct

SEQ ID NO: 3363 - DNA, 23 bp, Homo sapiens
  source 1..23: mol_type = genomic DNA
tcaggtgtgaacgagcctccctc

SEQ ID NO: 3364 - DNA, 23 bp, Homo sapiens
  source 1..23: mol_type = genomic DNA
caggtgtgaacgagcctccctcc

SEQ ID NO: 3365 - DNA, 23 bp, Homo sapiens
  source 1..23: mol_type = genomic DNA
aggtgtgaacgagcctccctccc

SEQ ID NO: 3366 - DNA, 23 bp, Homo sapiens
  source 1..23: mol_type = genomic DNA
ggtgtgaacgagcctccctcccc

SEQ ID NO: 3367 - DNA, 23 bp, Homo sapiens
  source 1..23: mol_type = genomic DNA
gtgtgaacgagcctccctcccct

SEQ ID NO: 3368 - DNA, 23 bp, Homo sapiens
  source 1..23: mol_type = genomic DNA
tgtgaacgagcctccctcccctt

SEQ ID NO: 3369 - DNA, 23 bp, Homo sapiens
  source 1..23: mol_type = genomic DNA
gtgaacgagcctccctccccttt

SEQ ID NO: 3370 - DNA, 23 bp, Homo sapiens
  source 1..23: mol_type = genomic DNA
tgaacgagcctccctcccctttc

SEQ ID NO: 3371 - DNA, 23 bp, Homo sapiens
  source 1..23: mol_type = genomic DNA
gaacgagcctccctcccctttct

SEQ ID NO: 3372 - DNA, 23 bp, Homo sapiens
  source 1..23: mol_type = genomic DNA
aacgagcctccctcccctttctt

SEQ ID NO: 3373 - DNA, 23 bp, Homo sapiens
  source 1..23: mol_type = genomic DNA
acgagcctccctcccctttcttc

SEQ ID NO: 3374 - DNA, 23 bp, Homo sapiens
  source 1..23: mol_type = genomic DNA
cgagcctccctcccctttcttct

SEQ ID NO: 3375 - DNA, 23 bp, Homo sapiens
  source 1..23: mol_type = genomic DNA
gagcctccctcccctttcttctc

SEQ ID NO: 3376 - DNA, 23 bp, Homo sapiens
  source 1..23: mol_type = genomic DNA
agcctccctcccctttcttctcg

SEQ ID NO: 3377 - DNA, 23 bp, Homo sapiens
  source 1..23: mol_type = genomic DNA
gcctccctcccctttcttctcgg

SEQ ID NO: 3378 - DNA, 23 bp, Homo sapiens
  source 1..23: mol_type = genomic DNA
cctccctcccctttcttctcggt

SEQ ID NO: 3379 - DNA, 23 bp, Homo sapiens
  source 1..23: mol_type = genomic DNA
ctccctcccctttcttctcggtg

SEQ ID NO: 3380 - DNA, 23 bp, Homo sapiens
  source 1..23: mol_type = genomic DNA
tccctcccctttcttctcggtgc

SEQ ID NO: 3381 - DNA, 23 bp, Homo sapiens
  source 1..23: mol_type = genomic DNA
ccctcccctttcttctcggtgct

SEQ ID NO: 3382 - DNA, 23 bp, Homo sapiens
  source 1..23: mol_type = genomic DNA
cctcccctttcttctcggtgctt

SEQ ID NO: 3383 - DNA, 23 bp, Homo sapiens
  source 1..23: mol_type = genomic DNA
ctcccctttcttctcggtgcttc

SEQ ID NO: 3384 - DNA, 23 bp, Homo sapiens
  source 1..23: mol_type = genomic DNA
tcccctttcttctcggtgcttct

SEQ ID NO: 3385 - DNA, 23 bp, Homo sapiens
  source 1..23: mol_type = genomic DNA
cccctttcttctcggtgcttctt

SEQ ID NO: 3386 - DNA, 23 bp, Homo sapiens
  source 1..23: mol_type = genomic DNA
ccctttcttctcggtgcttcttc

SEQ ID NO: 3387 - DNA, 23 bp, Homo sapiens
  source 1..23: mol_type = genomic DNA
cctttcttctcggtgcttcttct

SEQ ID NO: 3388 - DNA, 23 bp, Homo sapiens
  source 1..23: mol_type = genomic DNA
ctttcttctcggtgcttcttctc

SEQ ID NO: 3389 - DNA, 23 bp, Homo sapiens
  source 1..23: mol_type = genomic DNA
tttcttctcggtgcttcttctcg

SEQ ID NO: 3390 - DNA, 23 bp, Homo sapiens
  source 1..23: mol_type = genomic DNA
ttcttctcggtgcttcttctcgt

SEQ ID NO: 3391 - DNA, 23 bp, Homo sapiens
  source 1..23: mol_type = genomic DNA
tcttctcggtgcttcttctcgtg

SEQ ID NO: 3392 - DNA, 23 bp, Homo sapiens
  source 1..23: mol_type = genomic DNA
cttctcggtgcttcttctcgtga

SEQ ID NO: 3393 - DNA, 23 bp, Homo sapiens
  source 1..23: mol_type = genomic DNA
ttctcggtgcttcttctcgtgac

SEQ ID NO: 3394 - DNA, 23 bp, Homo sapiens
  source 1..23: mol_type = genomic DNA
tctcggtgcttcttctcgtgact

SEQ ID NO: 3395 - DNA, 23 bp, Homo sapiens
  source 1..23: mol_type = genomic DNA
ctcggtgcttcttctcgtgactt

SEQ ID NO: 3396 - DNA, 23 bp, Homo sapiens
  source 1..23: mol_type = genomic DNA
tcggtgcttcttctcgtgacttg

SEQ ID NO: 3397 - DNA, 23 bp, Homo sapiens
  source 1..23: mol_type = genomic DNA
cggtgcttcttctcgtgacttgg

SEQ ID NO: 3398 - DNA, 23 bp, synthetic construct
  source 1..23: mol_type = other DNA
tcaccaccaccaccaccatcatc

SEQ ID NO: 3399 - DNA, 23 bp, synthetic construct
  source 1..23: mol_type = other DNA
atcaccaccaccaccaccatcat

SEQ ID NO: 3400 - DNA, 23 bp, synthetic construct
  source 1..23: mol_type = other DNA
catcaccaccaccaccaccatca

SEQ ID NO: 3401 - DNA, 23 bp, synthetic construct
  source 1..23: mol_type = other DNA
ccatcaccaccaccaccaccatc

SEQ ID NO: 3402 - DNA, 23 bp, synthetic construct
  source 1..23: mol_type = other DNA
accatcaccaccaccaccaccat

SEQ ID NO: 3403 - DNA, 23 bp, synthetic construct
  source 1..23: mol_type = other DNA
caccatcaccaccaccaccacca

SEQ ID NO: 3404 - DNA, 23 bp, synthetic construct
  source 1..23: mol_type = other DNA
tcaccatcaccaccaccaccacc

SEQ ID NO: 3405 - DNA, 23 bp, synthetic construct
  source 1..23: mol_type = other DNA
atcaccatcaccaccaccaccac

SEQ ID NO: 3406 - DNA, 23 bp, synthetic construct
  source 1..23: mol_type = other DNA
catcaccatcaccaccaccacca

SEQ ID NO: 3407 - DNA, 23 bp, synthetic construct
  source 1..23: mol_type = other DNA
ccatcaccatcaccaccaccacc

SEQ ID NO: 3408 - DNA, 23 bp, synthetic construct
  source 1..23: mol_type = other DNA
accatcaccatcaccaccaccac

SEQ ID NO: 3409 - DNA, 23 bp, synthetic construct
  source 1..23: mol_type = other DNA
caccatcaccatcaccaccacca

SEQ ID NO: 3410 - DNA, 23 bp, synthetic construct
  source 1..23: mol_type = other DNA
ccaccatcaccatcaccaccacc

SEQ ID NO: 3411 - DNA, 23 bp, synthetic construct
  source 1..23: mol_type = other DNA
accaccatcaccatcaccaccac

SEQ ID NO: 3412 - DNA, 23 bp, synthetic construct
  source 1..23: mol_type = other DNA
caccaccatcaccatcaccacca

SEQ ID NO: 3413 - DNA, 23 bp, synthetic construct
  source 1..23: mol_type = other DNA
tcaccaccatcaccatcaccacc

SEQ ID NO: 3414 - DNA, 23 bp, synthetic construct
  source 1..23: mol_type = other DNA
atcaccaccatcaccatcaccac

SEQ ID NO: 3415 - DNA, 23 bp, synthetic construct
  source 1..23: mol_type = other DNA
catcaccaccatcaccatcacca

SEQ ID NO: 3416 - DNA, 23 bp, synthetic construct
  source 1..23: mol_type = other DNA
ccatcaccaccatcaccatcacc

SEQ ID NO: 3417 - DNA, 23 bp, synthetic construct
  source 1..23: mol_type = other DNA
accatcaccaccatcaccatcac

SEQ ID NO: 3418 - DNA, 23 bp, synthetic construct
  source 1..23: mol_type = other DNA
caccatcaccaccatcaccatca

SEQ ID NO: 3419 - DNA, 23 bp, synthetic construct
  source 1..23: mol_type = other DNA
tcaccatcaccaccatcaccatc

SEQ ID NO: 3420 - DNA, 23 bp, synthetic construct
  source 1..23: mol_type = other DNA
atcaccatcaccaccatcaccat

SEQ ID NO: 3421 - DNA, 23 bp, synthetic construct
  source 1..23: mol_type = other DNA
catcaccatcaccaccatcacca

SEQ ID NO: 3422 - DNA, 23 bp, synthetic construct
  source 1..23: mol_type = other DNA
ccatcaccatcaccaccatcacc

SEQ ID NO: 3423 - DNA, 23 bp, synthetic construct
  source 1..23: mol_type = other DNA
accatcaccatcaccaccatcac

SEQ ID NO: 3424 - DNA, 23 bp, synthetic construct
  source 1..23: mol_type = other DNA
caccatcaccatcaccaccatca

SEQ ID NO: 3425 - DNA, 23 bp, synthetic construct
  source 1..23: mol_type = other DNA
ccaccatcaccatcaccaccatc

SEQ ID NO: 3426 - DNA, 23 bp, synthetic construct
  source 1..23: mol_type = other DNA
accaccatcaccatcaccaccat

SEQ ID NO: 3427 - DNA, 23 bp, synthetic construct
  source 1..23: mol_type = other DNA
caccaccatcaccatcaccacca

SEQ ID NO: 3428 - DNA, 23 bp, synthetic construct
  source 1..23: mol_type = other DNA
ccaccaccatcaccatcaccacc

SEQ ID NO: 3429 - DNA, 23 bp, synthetic construct
  source 1..23: mol_type = other DNA
accaccaccatcaccatcaccac

SEQ ID NO: 3430 - DNA, 23 bp, synthetic construct
  source 1..23: mol_type = other DNA
caccaccaccatcaccatcacca

SEQ ID NO: 3431 - DNA, 23 bp, synthetic construct
  source 1..23: mol_type = other DNA
ccaccaccaccatcaccatcacc

SEQ ID NO: 3432 - DNA, 23 bp, synthetic construct
  source 1..23: mol_type = other DNA
accaccaccaccatcaccatcac

SEQ ID NO: 3433 - DNA, 23 bp, synthetic construct
  source 1..23: mol_type = other DNA
caccaccaccaccatcaccatca

SEQ ID NO: 3434 - DNA, 23 bp, synthetic construct
  source 1..23: mol_type = other DNA
ccaccaccaccaccatcaccatc

SEQ ID NO: 3435 - DNA, 23 bp, synthetic construct
  source 1..23: mol_type = other DNA
accaccaccaccaccatcaccat

SEQ ID NO: 3436 - DNA, 23 bp, synthetic construct
  source 1..23: mol_type = other DNA
caccaccaccaccaccatcacca

SEQ ID NO: 3437 - DNA, 23 bp, synthetic construct
  source 1..23: mol_type = other DNA
ccaccaccaccaccaccatcacc

SEQ ID NO: 3438 - DNA, 23 bp, synthetic construct
  source 1..23: mol_type = other DNA
accaccaccaccaccaccatcac

SEQ ID NO: 3439 - DNA, 23 bp, synthetic construct
  source 1..23: mol_type = other DNA
caccaccaccaccaccaccatca

SEQ ID NO: 3440 - DNA, 23 bp, synthetic construct
  source 1..23: mol_type = other DNA
ccaccaccaccaccaccaccatc

SEQ ID NO: 3441 - DNA, 23 bp, synthetic construct
  source 1..23: mol_type = other DNA
accaccaccaccaccaccaccat

SEQ ID NO: 3442 - DNA, 23 bp, synthetic construct
  source 1..23: mol_type = other DNA
caccaccaccaccaccaccacca

SEQ ID NO: 3443 - DNA, 23 bp, synthetic construct
  source 1..23: mol_type = other DNA
tcaccaccaccaccaccaccacc

SEQ ID NO: 3444 - DNA, 23 bp, synthetic construct
  source 1..23: mol_type = other DNA
atcaccaccaccaccaccaccac

SEQ ID NO: 3445 - DNA, 23 bp, synthetic construct
  source 1..23: mol_type = other DNA
catcaccaccaccaccaccacca

SEQ ID NO: 3446 - DNA, 23 bp, synthetic construct
  source 1..23: mol_type = other DNA
ccatcaccaccaccaccaccacc

SEQ ID NO: 3447 - DNA, 23 bp, synthetic construct
  source 1..23: mol_type = other DNA
accatcaccaccaccaccaccac

SEQ ID NO: 3448 - DNA, 23 bp, synthetic construct
  source 1..23: mol_type = other DNA
caccatcaccaccaccaccacca

SEQ ID NO: 3449 - DNA, 23 bp, synthetic construct
  source 1..23: mol_type = other DNA
ccaccatcaccaccaccaccacc

SEQ ID NO: 3450 - DNA, 23 bp, synthetic construct
  source 1..23: mol_type = other DNA
accaccatcaccaccaccaccac

SEQ ID NO: 3451 - DNA, 23 bp, synthetic construct
  source 1..23: mol_type = other DNA
caccaccatcaccaccaccacca

SEQ ID NO: 3452 - DNA, 23 bp, synthetic construct
  source 1..23: mol_type = other DNA
ccaccaccatcaccaccaccacc

SEQ ID NO: 3453 - DNA, 23 bp, synthetic construct
  source 1..23: mol_type = other DNA
accaccaccatcaccaccaccac

SEQ ID NO: 3454 - DNA, 23 bp, synthetic construct
  source 1..23: mol_type = other DNA
caccaccaccatcaccaccacca

SEQ ID NO: 3455 - DNA, 23 bp, synthetic construct
  source 1..23: mol_type = other DNA
tcaccaccaccatcaccaccacc

SEQ ID NO: 3456 - DNA, 23 bp, synthetic construct
  source 1..23: mol_type = other DNA
atcaccaccaccatcaccaccac

SEQ ID NO: 3457 - DNA, 23 bp, synthetic construct
  source 1..23: mol_type = other DNA
catcaccaccaccatcaccacca

SEQ ID NO: 3458 - DNA, 23 bp, synthetic construct
  source 1..23: mol_type = other DNA
ccatcaccaccaccatcaccacc

SEQ ID NO: 3459 - DNA, 23 bp, synthetic construct
  source 1..23: mol_type = other DNA
accatcaccaccaccatcaccac

SEQ ID NO: 3460 - DNA, 23 bp, synthetic construct
  source 1..23: mol_type = other DNA
aaccatcaccaccaccatcacca

SEQ ID NO: 3461 - DNA, 23 bp, synthetic construct
  source 1..23: mol_type = other DNA
aaaccatcaccaccaccatcacc

SEQ ID NO: 3462 - DNA, 23 bp, synthetic construct
  source 1..23: mol_type = other DNA
aaaaccatcaccaccaccatcac

SEQ ID NO: 3463 - DNA, 23 bp, synthetic construct
  source 1..23: mol_type = other DNA
caaaaccatcaccaccaccatca

SEQ ID NO: 3464 - DNA, 23 bp, synthetic construct
  source 1..23: mol_type = other DNA
ccaaaaccatcaccaccaccatc

SEQ ID NO: 3465 - DNA, 23 bp, synthetic construct
  source 1..23: mol_type = other DNA
accaaaaccatcaccaccaccat

SEQ ID NO: 3466 - DNA, 23 bp, synthetic construct
  source 1..23: mol_type = other DNA
caccaaaaccatcaccaccacca

SEQ ID NO: 3467 - DNA, 23 bp, synthetic construct
  source 1..23: mol_type = other DNA
ccaccaaaaccatcaccaccacc

SEQ ID NO: 3468 - DNA, 23 bp, synthetic construct
  source 1..23: mol_type = other DNA
accaccaaaaccatcaccaccac

SEQ ID NO: 3469 - DNA, 23 bp, synthetic construct
  source 1..23: mol_type = other DNA
caccaccaaaaccatcaccacca

SEQ ID NO: 3470 - DNA, 23 bp, synthetic construct
  source 1..23: mol_type = other DNA
ccaccaccaaaaccatcaccacc

SEQ ID NO: 3471 - DNA, 23 bp, synthetic construct
  source 1..23: mol_type = other DNA
accaccaccaaaaccatcaccac

SEQ ID NO: 3472 - DNA, 23 bp, synthetic construct
  source 1..23: mol_type = other DNA
caccaccaccaaaaccatcacca

SEQ ID NO: 3473 - DNA, 23 bp, synthetic construct
  source 1..23: mol_type = other DNA
tcaccaccaccaaaaccatcacc

SEQ ID NO: 3474 - DNA, 23 bp, synthetic construct
  source 1..23: mol_type = other DNA
atcaccaccaccaaaaccatcac

SEQ ID NO: 3475 - DNA, 23 bp, synthetic construct
  source 1..23: mol_type = other DNA
catcaccaccaccaaaaccatca

SEQ ID NO: 3476 - DNA, 23 bp, synthetic construct
  source 1..23: mol_type = other DNA
ccatcaccaccaccaaaaccatc

SEQ ID NO: 3477 - DNA, 23 bp, synthetic construct
  source 1..23: mol_type = other DNA
accatcaccaccaccaaaaccat

SEQ ID NO: 3478 - DNA, 23 bp, synthetic construct
  source 1..23: mol_type = other DNA
caccatcaccaccaccaaaacca

SEQ ID NO: 3479 - DNA, 23 bp, synthetic construct
  source 1..23: mol_type = other DNA
ccaccatcaccaccaccaaaacc

SEQ ID NO: 3480 - DNA, 23 bp, synthetic construct
  source 1..23: mol_type = other DNA
accaccatcaccaccaccaaaac

SEQ ID NO: 3481 - DNA, 23 bp, synthetic construct
  source 1..23: mol_type = other DNA
gaccaccatcaccaccaccaaaa

SEQ ID NO: 3482 - DNA, 23 bp, synthetic construct
  source 1..23: mol_type = other DNA
tgaccaccatcaccaccaccaaa

SEQ ID NO: 3483 - DNA, 23 bp, synthetic construct
  source 1..23: mol_type = other DNA
atgaccaccatcaccaccaccaa

SEQ ID NO: 3484 - DNA, 23 bp, synthetic construct
  source 1..23: mol_type = other DNA
catgaccaccatcaccaccacca

SEQ ID NO: 3485 - DNA, 23 bp, synthetic construct
  source 1..23: mol_type = other DNA
ccatgaccaccatcaccaccacc

SEQ ID NO: 3486 - DNA, 23 bp, synthetic construct
  source 1..23: mol_type = other DNA
accatgaccaccatcaccaccac

SEQ ID NO: 3487 - DNA, 23 bp, synthetic construct
  source 1..23: mol_type = other DNA
caccatgaccaccatcaccacca

SEQ ID NO: 3488 - DNA, 23 bp, synthetic construct
  source 1..23: mol_type = other DNA
acaccatgaccaccatcaccacc

SEQ ID NO: 3489 - DNA, 23 bp, synthetic construct
  source 1..23: mol_type = other DNA
aacaccatgaccaccatcaccac

SEQ ID NO: 3490 - DNA, 23 bp, synthetic construct
  source 1..23: mol_type = other DNA
caacaccatgaccaccatcacca

SEQ ID NO: 3491 - DNA, 23 bp, synthetic construct
  source 1..23: mol_type = other DNA
tcaacaccatgaccaccatcacc

SEQ ID NO: 3492 - DNA, 23 bp, synthetic construct
  source 1..23: mol_type = other DNA
atcaacaccatgaccaccatcac

SEQ ID NO: 3493 - DNA, 23 bp, synthetic construct
  source 1..23: mol_type = other DNA
catcaacaccatgaccaccatca

SEQ ID NO: 3494 - DNA, 23 bp, synthetic construct
  source 1..23: mol_type = other DNA
acatcaacaccatgaccaccatc

SEQ ID NO: 3495 - DNA, 23 bp, synthetic construct
  source 1..23: mol_type = other DNA
cacatcaacaccatgaccaccat

SEQ ID NO: 3496 - DNA, 23 bp, synthetic construct
  source 1..23: mol_type = other DNA
tcacatcaacaccatgaccacca

SEQ ID NO: 3497 - DNA, 23 bp, synthetic construct
  source 1..23: mol_type = other DNA
atcacatcaacaccatgaccacc

SEQ ID NO: 3498 - DNA, 23 bp, synthetic construct
  source 1..23: mol_type = other DNA
catcacatcaacaccatgaccac

SEQ ID NO: 3499 - DNA, 23 bp, synthetic construct
  source 1..23: mol_type = other DNA
ccatcacatcaacaccatgacca

SEQ ID NO: 3500 - DNA, 23 bp, synthetic construct
  source 1..23: mol_type = other DNA
accatcacatcaacaccatgacc

SEQ ID NO: 3501 - DNA, 23 bp, synthetic construct
  source 1..23: mol_type = other DNA
caccatcacatcaacaccatgac

SEQ ID NO: 3502 - DNA, 23 bp, synthetic construct
  source 1..23: mol_type = other DNA
ccaccatcacatcaacaccatga

SEQ ID NO: 3503 - DNA, 23 bp, synthetic construct
  source 1..23: mol_type = other DNA
accaccatcacatcaacaccatg

SEQ ID NO: 3504 - DNA, 23 bp, synthetic construct
  source 1..23: mol_type = other DNA
caccaccatcacatcaacaccat

SEQ ID NO: 3505 - DNA, 23 bp, synthetic construct
  source 1..23: mol_type = other DNA
ccaccaccatcacatcaacacca

SEQ ID NO: 3506 - DNA, 23 bp, synthetic construct
  source 1..23: mol_type = other DNA
accaccaccatcacatcaacacc

SEQ ID NO: 3507 - DNA, 23 bp, synthetic construct
  source 1..23: mol_type = other DNA
caccaccaccatcacatcaacac

SEQ ID NO: 3508 - DNA, 23 bp, synthetic construct
  source 1..23: mol_type = other DNA
acaccaccaccatcacatcaaca

SEQ ID NO: 3509 - DNA, 23 bp, synthetic construct
  source 1..23: mol_type = other DNA
aacaccaccaccatcacatcaac

SEQ ID NO: 3510 - DNA, 23 bp, synthetic construct
  source 1..23: mol_type = other DNA
caacaccaccaccatcacatcaa

SEQ ID NO: 3511 - DNA, 23 bp, synthetic construct
  source 1..23: mol_type = other DNA
ccaacaccaccaccatcacatca

SEQ ID NO: 3512 - DNA, 23 bp, synthetic construct
  source 1..23: mol_type = other DNA
accaacaccaccaccatcacatc

SEQ ID NO: 3513 - DNA, 23 bp, synthetic construct
  source 1..23: mol_type = other DNA
caccaacaccaccaccatcacat

SEQ ID NO: 3514 - DNA, 23 bp, synthetic construct
  source 1..23: mol_type = other DNA
ccaccaacaccaccaccatcaca

SEQ ID NO: 3515 - DNA, 23 bp, synthetic construct
  source 1..23: mol_type = other DNA
accaccaacaccaccaccatcac

SEQ ID NO: 3516 - DNA, 23 bp, synthetic construct
  source 1..23: mol_type = other DNA
caccaccaacaccaccaccatca

SEQ ID NO: 3517 - DNA, 23 bp, synthetic construct
  source 1..23: mol_type = other DNA
ccaccaccaacaccaccaccatc

SEQ ID NO: 3518 - DNA, 23 bp, synthetic construct
  source 1..23: mol_type = other DNA
accaccaccaacaccaccaccat

SEQ ID NO: 3519 - DNA, 23 bp, synthetic construct
  source 1..23: mol_type = other DNA
caccaccaccaacaccaccacca

SEQ ID NO: 3520 - DNA, 23 bp, synthetic construct
  source 1..23: mol_type = other DNA
tcaccaccaccaacaccaccacc

SEQ ID NO: 3521 - DNA, 23 bp, synthetic construct
  source 1..23: mol_type = other DNA
atcaccaccaccaacaccaccac

SEQ ID NO: 3522 - DNA, 23 bp, synthetic construct
  source 1..23: mol_type = other DNA
catcaccaccaccaacaccacca

SEQ ID NO: 3523 - DNA, 23 bp, synthetic construct
  source 1..23: mol_type = other DNA
ccatcaccaccaccaacaccacc

SEQ ID NO: 3524 - DNA, 23 bp, synthetic construct
  source 1..23: mol_type = other DNA
accatcaccaccaccaacaccac

SEQ ID NO: 3525 - DNA, 23 bp, synthetic construct
  source 1..23: mol_type = other DNA
caccatcaccaccaccaacacca

SEQ ID NO: 3526 - DNA, 23 bp, synthetic construct
  source 1..23: mol_type = other DNA
tcaccatcaccaccaccaacacc

SEQ ID NO: 3527 - DNA, 23 bp, synthetic construct
  source 1..23: mol_type = other DNA
atcaccatcaccaccaccaacac

SEQ ID NO: 3528 - DNA, 23 bp, synthetic construct
  source 1..23: mol_type = other DNA
catcaccatcaccaccaccaaca

SEQ ID NO: 3529 - DNA, 23 bp, synthetic construct
  source 1..23: mol_type = other DNA
gcatcaccatcaccaccaccaac

SEQ ID NO: 3530 - DNA, 23 bp, synthetic construct
  source 1..23: mol_type = other DNA
agcatcaccatcaccaccaccaa

SEQ ID NO: 3531 - DNA, 23 bp, synthetic construct
  source 1..23: mol_type = other DNA
aagcatcaccatcaccaccacca

SEQ ID NO: 3532 - DNA, 23 bp, synthetic construct
  source 1..23: mol_type = other DNA
gaagcatcaccatcaccaccacc

SEQ ID NO: 3533 - DNA, 23 bp, synthetic construct
  source 1..23: mol_type = other DNA
agaagcatcaccatcaccaccac

SEQ ID NO: 3534 - DNA, 23 bp, synthetic construct
  source 1..23: mol_type = other DNA
cagaagcatcaccatcaccacca

SEQ ID NO: 3535 - DNA, 23 bp, synthetic construct
  source 1..23: mol_type = other DNA
ccagaagcatcaccatcaccacc

SEQ ID NO: 3536 - DNA, 23 bp, synthetic construct
  source 1..23: mol_type = other DNA
accagaagcatcaccatcaccac

SEQ ID NO: 3537 - DNA, 23 bp, synthetic construct
  source 1..23: mol_type = other DNA
caccagaagcatcaccatcacca

SEQ ID NO: 3538 - DNA, 23 bp, synthetic construct
  source 1..23: mol_type = other DNA
tcaccagaagcatcaccatcacc

SEQ ID NO: 3539 - DNA, 23 bp, synthetic construct
  source 1..23: mol_type = other DNA
atcaccagaagcatcaccatcac

SEQ ID NO: 3540 - DNA, 23 bp, synthetic construct
  source 1..23: mol_type = other DNA
catcaccagaagcatcaccatca

SEQ ID NO: 3541 - DNA, 23 bp, synthetic construct
  source 1..23: mol_type = other DNA
ccatcaccagaagcatcaccatc

SEQ ID NO: 3542 - DNA, 23 bp, synthetic construct
  source 1..23: mol_type = other DNA
accatcaccagaagcatcaccat

SEQ ID NO: 3543 - DNA, 23 bp, synthetic construct
  source 1..23: mol_type = other DNA
caccatcaccagaagcatcacca

SEQ ID NO: 3544 - DNA, 23 bp, synthetic construct
  source 1..23: mol_type = other DNA
ccaccatcaccagaagcatcacc

SEQ ID NO: 3545 - DNA, 23 bp, synthetic construct
  source 1..23: mol_type = other DNA
accaccatcaccagaagcatcac

SEQ ID NO: 3546 - DNA, 23 bp, synthetic construct
  source 1..23: mol_type = other DNA
gaccaccatcaccagaagcatca

SEQ ID NO: 3547 - DNA, 23 bp, synthetic construct
  source 1..23: mol_type = other DNA
tgaccaccatcaccagaagcatc

SEQ ID NO: 3548 - DNA, 23 bp, synthetic construct
  source 1..23: mol_type = other DNA
atgaccaccatcaccagaagcat

SEQ ID NO: 3549 - DNA, 23 bp, synthetic construct
  source 1..23: mol_type = other DNA
catgaccaccatcaccagaagca

SEQ ID NO: 3550 - DNA, 23 bp, synthetic construct
  source 1..23: mol_type = other DNA
tcatgaccaccatcaccagaagc

SEQ ID NO: 3551 - DNA, 23 bp, synthetic construct
  source 1..23: mol_type = other DNA
atcatgaccaccatcaccagaag

SEQ ID NO: 3552 - DNA, 23 bp, synthetic construct
  source 1..23: mol_type = other DNA
catcatgaccaccatcaccagaa

SEQ ID NO: 3553 - DNA, 23 bp, synthetic construct
  source 1..23: mol_type = other DNA
ccatcatgaccaccatcaccaga

SEQ ID NO: 3554 - DNA, 23 bp, synthetic construct
  source 1..23: mol_type = other DNA
accatcatgaccaccatcaccag

SEQ ID NO: 3555 - DNA, 23 bp, synthetic construct
  source 1..23: mol_type = other DNA
caccatcatgaccaccatcacca

SEQ ID NO: 3556 - DNA, 23 bp, synthetic construct
  source 1..23: mol_type = other DNA
ccaccatcatgaccaccatcacc

SEQ ID NO: 3557 - DNA, 23 bp, synthetic construct
  source 1..23: mol_type = other DNA
accaccatcatgaccaccatcac

SEQ ID NO: 3558 - DNA, 23 bp, synthetic construct
  source 1..23: mol_type = other DNA
caccaccatcatgaccaccatca

SEQ ID NO: 3559 - DNA, 23 bp, synthetic construct
  source 1..23: mol_type = other DNA
gcaccaccatcatgaccaccatc

SEQ ID NO: 3560 - DNA, 23 bp, synthetic construct
  source 1..23: mol_type = other DNA
ggcaccaccatcatgaccaccat

SEQ ID NO: 3561 - DNA, 23 bp, synthetic construct
  source 1..23: mol_type = other DNA
cggcaccaccatcatgaccacca

SEQ ID NO: 3562 - DNA, 23 bp, synthetic construct
  source 1..23: mol_type = other DNA
acggcaccaccatcatgaccacc

SEQ ID NO: 3563 - DNA, 23 bp, synthetic construct
  source 1..23: mol_type = other DNA
gacggcaccaccatcatgaccac

SEQ ID NO: 3564 - DNA, 23 bp, synthetic construct
  source 1..23: mol_type = other DNA
agacggcaccaccatcatgacca

SEQ ID NO: 3565 - DNA, 23 bp, synthetic construct
  source 1..23: mol_type = other DNA
cagacggcaccaccatcatgacc

SEQ ID NO: 3566 - DNA, 23 bp, synthetic construct
  source 1..23: mol_type = other DNA
gcagacggcaccaccatcatgac

SEQ ID NO: 3567 - DNA, 23 bp, synthetic construct
  source 1..23: mol_type = other DNA
ggcagacggcaccaccatcatga

SEQ ID NO: 3568 - DNA, 23 bp, synthetic construct
  source 1..23: mol_type = other DNA
aggcagacggcaccaccatcatg

SEQ ID NO: 3569 - DNA, 23 bp, synthetic construct
  source 1..23: mol_type = other DNA
gaggcagacggcaccaccatcat

SEQ ID NO: 3570 - DNA, 23 bp, synthetic construct
  source 1..23: mol_type = other DNA
agaggcagacggcaccaccatca

SEQ ID NO: 3571 - DNA, 23 bp, synthetic construct
  source 1..23: mol_type = other DNA
gagaggcagacggcaccaccatc

SEQ ID NO: 3572 - DNA, 23 bp, synthetic construct
  source 1..23: mol_type = other DNA
tgagaggcagacggcaccaccat

SEQ ID NO: 3573 - DNA, 23 bp, synthetic construct
  source 1..23: mol_type = other DNA
ctgagaggcagacggcaccacca

SEQ ID NO: 3574 - DNA, 23 bp, synthetic construct
  source 1..23: mol_type = other DNA
cctgagaggcagacggcaccacc

SEQ ID NO: 3575 - DNA, 23 bp, synthetic construct
  source 1..23: mol_type = other DNA
tcctgagaggcagacggcaccac

SEQ ID NO: 3576 - DNA, 23 bp, synthetic construct
  source 1..23: mol_type = other DNA
ctcctgagaggcagacggcacca

SEQ ID NO: 3577 - DNA, 23 bp, synthetic construct
  source 1..23: mol_type = other DNA
gctcctgagaggcagacggcacc

SEQ ID NO: 3578 - DNA, 23 bp, synthetic construct
  source 1..23: mol_type = other DNA
agctcctgagaggcagacggcac

SEQ ID NO: 3579 - DNA, 23 bp, synthetic construct
  source 1..23: mol_type = other DNA
cagctcctgagaggcagacggca

SEQ ID NO: 3580 - DNA, 23 bp, synthetic construct
  source 1..23: mol_type = other DNA
ccagctcctgagaggcagacggc

SEQ ID NO: 3581 - DNA, 23 bp, synthetic construct
  source 1..23: mol_type = other DNA
accagctcctgagaggcagacgg

SEQ ID NO: 3582 - DNA, 23 bp, synthetic construct
  source 1..23: mol_type = other DNA
gaccagctcctgagaggcagacg

SEQ ID NO: 3583 - DNA, 23 bp, synthetic construct
  source 1..23: mol_type = other DNA
tgaccagctcctgagaggcagac

SEQ ID NO: 3584 - DNA, 23 bp, synthetic construct
  source 1..23: mol_type = other DNA
gtgaccagctcctgagaggcaga

SEQ ID NO: 3585 - DNA, 23 bp, synthetic construct
  source 1..23: mol_type = other DNA
agtgaccagctcctgagaggcag

SEQ ID NO: 3586 - DNA, 23 bp, synthetic construct
  source 1..23: mol_type = other DNA
cagtgaccagctcctgagaggca

SEQ ID NO: 3587 - DNA, 23 bp, synthetic construct
  source 1..23: mol_type = other DNA
gcagtgaccagctcctgagaggc

SEQ ID NO: 3588 - DNA, 23 bp, synthetic construct
  source 1..23: mol_type = other DNA
ggcagtgaccagctcctgagagg

SEQ ID NO: 3589 - DNA, 23 bp, synthetic construct
  source 1..23: mol_type = other DNA
aggcagtgaccagctcctgagag

SEQ ID NO: 3590 - DNA, 23 bp, synthetic construct
  source 1..23: mol_type = other DNA
caggcagtgaccagctcctgaga

SEQ ID NO: 3591 - DNA, 23 bp, synthetic construct
  source 1..23: mol_type = other DNA
ccaggcagtgaccagctcctgag

SEQ ID NO: 3592 - DNA, 23 bp, synthetic construct
  source 1..23: mol_type = other DNA
accaggcagtgaccagctcctga

SEQ ID NO: 3593 - DNA, 23 bp, synthetic construct
  source 1..23: mol_type = other DNA
taccaggcagtgaccagctcctg

SEQ ID NO: 3594 - DNA, 23 bp, synthetic construct
  source 1..23: mol_type = other DNA
gtaccaggcagtgaccagctcct

SEQ ID NO: 3595 - DNA, 23 bp, synthetic construct
  source 1..23: mol_type = other DNA
tgtaccaggcagtgaccagctcc

SEQ ID NO: 3596 - DNA, 23 bp, synthetic construct
  source 1..23: mol_type = other DNA
atgtaccaggcagtgaccagctc

SEQ ID NO: 3597 - DNA, 23 bp, synthetic construct
  source 1..23: mol_type = other DNA
gatgtaccaggcagtgaccagct

SEQ ID NO: 3598 - DNA, 23 bp, synthetic construct
  source 1..23: mol_type = other DNA
cgatgtaccaggcagtgaccagc

SEQ ID NO: 3599 - DNA, 23 bp, synthetic construct
  source 1..23: mol_type = other DNA
ccgatgtaccaggcagtgaccag

SEQ ID NO: 3600 - DNA, 23 bp, synthetic construct
  source 1..23: mol_type = other DNA
gccgatgtaccaggcagtgacca

SEQ ID NO: 3601 - DNA, 23 bp, synthetic construct
  source 1..23: mol_type = other DNA
agccgatgtaccaggcagtgacc

SEQ ID NO: 3602 - DNA, 23 bp, synthetic construct
  source 1..23: mol_type = other DNA
aagccgatgtaccaggcagtgac

SEQ ID NO: 3603 - DNA, 23 bp, synthetic construct
  source 1..23: mol_type = other DNA
gaagccgatgtaccaggcagtga

SEQ ID NO: 3604 - DNA, 23 bp, synthetic construct
  source 1..23: mol_type = other DNA
ggaagccgatgtaccaggcagtg

SEQ ID NO: 3605 - DNA, 23 bp, synthetic construct
  source 1..23: mol_type = other DNA
aggaagccgatgtaccaggcagt

SEQ ID NO: 3606 - DNA, 23 bp, synthetic construct
  source 1..23: mol_type = other DNA
aaggaagccgatgtaccaggcag

SEQ ID NO: 3607 - DNA, 23 bp, synthetic construct
  source 1..23: mol_type = other DNA
aaaggaagccgatgtaccaggca

SEQ ID NO: 3608 - DNA, 23 bp, synthetic construct
  source 1..23: mol_type = other DNA
caaaggaagccgatgtaccaggc

SEQ ID NO: 3609 - DNA, 23 bp, synthetic construct
  source 1..23: mol_type = other DNA
acaaaggaagccgatgtaccagg

SEQ ID NO: 3610 - DNA, 23 bp, synthetic construct
  source 1..23: mol_type = other DNA
gacaaaggaagccgatgtaccag

SEQ ID NO: 3611 - DNA, 23 bp, synthetic construct
  source 1..23: mol_type = other DNA
agacaaaggaagccgatgtacca

SEQ ID NO: 3612 - DNA, 23 bp, synthetic construct
  source 1..23: mol_type = other DNA
gagacaaaggaagccgatgtacc

SEQ ID NO: 3613 - DNA, 23 bp, synthetic construct
  source 1..23: mol_type = other DNA
tgagacaaaggaagccgatgtac

SEQ ID NO: 3614 - DNA, 23 bp, synthetic construct
  source 1..23: mol_type = other DNA
atgagacaaaggaagccgatgta

SEQ ID NO: 3615 - DNA, 23 bp, synthetic construct
  source 1..23: mol_type = other DNA
gatgagacaaaggaagccgatgt

SEQ ID NO: 3616 - DNA, 23 bp, synthetic construct
  source 1..23: mol_type = other DNA
ggatgagacaaaggaagccgatg

SEQ ID NO: 3617 - DNA, 23 bp, synthetic construct
  source 1..23: mol_type = other DNA
aggatgagacaaaggaagccgat

SEQ ID NO: 3618 - DNA, 23 bp, synthetic construct
  source 1..23: mol_type = other DNA
caggatgagacaaaggaagccga

SEQ ID NO: 3619 - DNA, 23 bp, synthetic construct
  source 1..23: mol_type = other DNA
ccaggatgagacaaaggaagccg

SEQ ID NO: 3620 - DNA, 23 bp, synthetic construct
  source 1..23: mol_type = other DNA
gccaggatgagacaaaggaagcc

SEQ ID NO: 3621 - DNA, 23 bp, synthetic construct
  source 1..23: mol_type = other DNA
ggccaggatgagacaaaggaagc

SEQ ID NO: 3622 - DNA, 23 bp, synthetic construct
  source 1..23: mol_type = other DNA
aggccaggatgagacaaaggaag

SEQ ID NO: 3623 - DNA, 23 bp, synthetic construct
  source 1..23: mol_type = other DNA
gaggccaggatgagacaaaggaa

SEQ ID NO: 3624 - DNA, 23 bp, synthetic construct
  source 1..23: mol_type = other DNA
cgaggccaggatgagacaaagga

SEQ ID NO: 3625 - DNA, 23 bp, synthetic construct
  source 1..23: mol_type = other DNA
acgaggccaggatgagacaaagg

SEQ ID NO: 3626 - DNA, 23 bp, synthetic construct
  source 1..23: mol_type = other DNA
aacgaggccaggatgagacaaag

SEQ ID NO: 3627 - DNA, 23 bp, synthetic construct
  source 1..23: mol_type = other DNA
gaacgaggccaggatgagacaaa

SEQ ID NO: 3628 - DNA, 23 bp, synthetic construct
  source 1..23: mol_type = other DNA
ggaacgaggccaggatgagacaa

SEQ ID NO: 3629 - DNA, 23 bp, synthetic construct
  source 1..23: mol_type = other DNA
aggaacgaggccaggatgagaca

SEQ ID NO: 3630 - DNA, 23 bp, synthetic construct
  source 1..23: mol_type = other DNA
caggaacgaggccaggatgagac

SEQ ID NO: 3631 - DNA, 23 bp, synthetic construct
  source 1..23: mol_type = other DNA
ccaggaacgaggccaggatgaga

SEQ ID NO: 3632 - DNA, 23 bp, synthetic construct
  source 1..23: mol_type = other DNA
accaggaacgaggccaggatgag

SEQ ID NO: 3633 - DNA, 23 bp, synthetic construct
  source 1..23: mol_type = other DNA
caccaggaacgaggccaggatga

SEQ ID NO: 3634 - DNA, 23 bp, synthetic construct
  source 1..23: mol_type = other DNA
acaccaggaacgaggccaggatg

SEQ ID NO: 3635 - DNA, 23 bp, synthetic construct
  source 1..23: mol_type = other DNA
tacaccaggaacgaggccaggat

SEQ ID NO: 3636 - DNA, 23 bp, synthetic construct
  source 1..23: mol_type = other DNA
gtacaccaggaacgaggccagga

SEQ ID NO: 3637 - DNA, 23 bp, synthetic construct
  source 1..23: mol_type = other DNA
agtacaccaggaacgaggccagg

SEQ ID NO: 3638 - DNA, 23 bp, synthetic construct
  source 1..23: mol_type = other DNA
aagtacaccaggaacgaggccag

SEQ ID NO: 3639 - DNA, 23 bp, synthetic construct
  source 1..23: mol_type = other DNA
caagtacaccaggaacgaggcca

SEQ ID NO: 3640 - DNA, 23 bp, synthetic construct
  source 1..23: mol_type = other DNA
ccaagtacaccaggaacgaggcc

SEQ ID NO: 3641 - DNA, 23 bp, synthetic construct
  source 1..23: mol_type = other DNA
gccaagtacaccaggaacgaggc

SEQ ID NO: 3642 - DNA, 23 bp, synthetic construct
  source 1..23: mol_type = other DNA
tgccaagtacaccaggaacgagg

SEQ ID NO: 3643 - DNA, 23 bp, synthetic construct
  source 1..23: mol_type = other DNA
ctgccaagtacaccaggaacgag

SEQ ID NO: 3644 - DNA, 23 bp, synthetic construct
  source 1..23: mol_type = other DNA
tctgccaagtacaccaggaacga

SEQ ID NO: 3645 - DNA, 23 bp, synthetic construct
  source 1..23: mol_type = other DNA
ctctgccaagtacaccaggaacg

SEQ ID NO: 3646 - DNA, 23 bp, synthetic construct
  source 1..23: mol_type = other DNA
tctctgccaagtacaccaggaac

SEQ ID NO: 3647 - DNA, 23 bp, synthetic construct
  source 1..23: mol_type = other DNA
ttctctgccaagtacaccaggaa

SEQ ID NO: 3648 - DNA, 23 bp, synthetic construct
  source 1..23: mol_type = other DNA
cttctctgccaagtacaccagga

SEQ ID NO: 3649 - DNA, 23 bp, synthetic construct
  source 1..23: mol_type = other DNA
ccttctctgccaagtacaccagg

SEQ ID NO: 3650 - DNA, 23 bp, synthetic construct
  source 1..23: mol_type = other DNA
cccttctctgccaagtacaccag

SEQ ID NO: 3651 - DNA, 23 bp, synthetic construct
  source 1..23: mol_type = other DNA
ccccttctctgccaagtacacca

SEQ ID NO: 3652 - DNA, 23 bp, synthetic construct
  source 1..23: mol_type = other DNA
cccccttctctgccaagtacacc

SEQ ID NO: 3653 - DNA, 23 bp, synthetic construct
  source 1..23: mol_type = other DNA
tcccccttctctgccaagtacac

SEQ ID NO: 3654 - DNA, 23 bp, synthetic construct
  source 1..23: mol_type = other DNA
ctcccccttctctgccaagtaca

SEQ ID NO: 3655 - DNA, 23 bp, synthetic construct
  source 1..23: mol_type = other DNA
tctcccccttctctgccaagtac

SEQ ID NO: 3656 - DNA, 23 bp, synthetic construct
  source 1..23: mol_type = other DNA
ttctcccccttctctgccaagta

SEQ ID NO: 3657 - DNA, 23 bp, synthetic construct
  source 1..23: mol_type = other DNA
gttctcccccttctctgccaagt

SEQ ID NO: 3658 - DNA, 23 bp, synthetic construct
  source 1..23: mol_type = other DNA
cgttctcccccttctctgccaag

SEQ ID NO: 3659 - DNA, 23 bp, synthetic construct
  source 1..23: mol_type = other DNA
tcgttctcccccttctctgccaa

SEQ ID NO: 3660 - DNA, 23 bp, synthetic construct
  source 1..23: mol_type = other DNA
gtcgttctcccccttctctgcca

SEQ ID NO: 3661 - DNA, 23 bp, synthetic construct
  source 1..23: mol_type = other DNA
ggtcgttctcccccttctctgcc

SEQ ID NO: 3662 - DNA, 23 bp, synthetic construct
  source 1..23: mol_type = other DNA
tggtcgttctcccccttctctgc

SEQ ID NO: 3663 - DNA, 23 bp, synthetic construct
  source 1..23: mol_type = other DNA
gtggtcgttctcccccttctctg

SEQ ID NO: 3664 - DNA, 23 bp, synthetic construct
  source 1..23: mol_type = other DNA
agtggtcgttctcccccttctct

SEQ ID NO: 3665 - DNA, 23 bp, synthetic construct
  source 1..23: mol_type = other DNA
aagtggtcgttctcccccttctc

SEQ ID NO: 3666 - DNA, 23 bp, synthetic construct
  source 1..23: mol_type = other DNA
aaagtggtcgttctcccccttct

SEQ ID NO: 3667 - DNA, 23 bp, synthetic construct
  source 1..23: mol_type = other DNA
caaagtggtcgttctcccccttc

SEQ ID NO: 3668 - DNA, 23 bp, synthetic construct
  source 1..23: mol_type = other DNA
tcaaagtggtcgttctccccctt

SEQ ID NO: 3669 - DNA, 23 bp, synthetic construct
  source 1..23: mol_type = other DNA
gtcaaagtggtcgttctccccct

SEQ ID NO: 3670 - DNA, 23 bp, synthetic construct
  source 1..23: mol_type = other DNA
tgtcaaagtggtcgttctccccc

SEQ ID NO: 3671 - DNA, 23 bp, synthetic construct
  source 1..23: mol_type = other DNA
gtgtcaaagtggtcgttctcccc

SEQ ID NO: 3672 - DNA, 23 bp, synthetic construct
  source 1..23: mol_type = other DNA
ggtgtcaaagtggtcgttctccc

SEQ ID NO: 3673 - DNA, 23 bp, synthetic construct
  source 1..23: mol_type = other DNA
aggtgtcaaagtggtcgttctcc

SEQ ID NO: 3674 - DNA, 23 bp, synthetic construct
  source 1..23: mol_type = other DNA
taggtgtcaaagtggtcgttctc

SEQ ID NO: 3675 - DNA, 23 bp, synthetic construct
  source 1..23: mol_type = other DNA
gtaggtgtcaaagtggtcgttct

SEQ ID NO: 3676 - DNA, 23 bp, synthetic construct
  source 1..23: mol_type = other DNA
cgtaggtgtcaaagtggtcgttc

SEQ ID NO: 3677 - DNA, 23 bp, synthetic construct
  source 1..23: mol_type = other DNA
gcgtaggtgtcaaagtggtcgtt

SEQ ID NO: 3678 - DNA, 23 bp, synthetic construct
  source 1..23: mol_type = other DNA
cgcgtaggtgtcaaagtggtcgt

SEQ ID NO: 3679 - DNA, 23 bp, synthetic construct
  source 1..23: mol_type = other DNA
ccgcgtaggtgtcaaagtggtcg

SEQ ID NO: 3680 - DNA, 23 bp, synthetic construct
  source 1..23: mol_type = other DNA
tccgcgtaggtgtcaaagtggtc

SEQ ID NO: 3681 - DNA, 23 bp, synthetic construct
  source 1..23: mol_type = other DNA
atccgcgtaggtgtcaaagtggt

SEQ ID NO: 3682 - DNA, 23 bp, synthetic construct
  source 1..23: mol_type = other DNA
catccgcgtaggtgtcaaagtgg

SEQ ID NO: 3683 - DNA, 23 bp, synthetic construct
  source 1..23: mol_type = other DNA
gcatccgcgtaggtgtcaaagtg

SEQ ID NO: 3684 - DNA, 23 bp, synthetic construct
  source 1..23: mol_type = other DNA
tgcatccgcgtaggtgtcaaagt

SEQ ID NO: 3685 - DNA, 23 bp, synthetic construct
  source 1..23: mol_type = other DNA
gtgcatccgcgtaggtgtcaaag

SEQ ID NO: 3686 - DNA, 23 bp, synthetic construct
  source 1..23: mol_type = other DNA
agtgcatccgcgtaggtgtcaaa

SEQ ID NO: 3687 - DNA, 23 bp, synthetic construct
  source 1..23: mol_type = other DNA
gagtgcatccgcgtaggtgtcaa

SEQ ID NO: 3688 - DNA, 23 bp, synthetic construct
  source 1..23: mol_type = other DNA
agagtgcatccgcgtaggtgtca

SEQ ID NO: 3689 - DNA, 23 bp, synthetic construct
  source 1..23: mol_type = other DNA
cagagtgcatccgcgtaggtgtc

SEQ ID NO: 3690 - DNA, 23 bp, synthetic construct
  source 1..23: mol_type = other DNA
ccagagtgcatccgcgtaggtgt

SEQ ID NO: 3691 - DNA, 23 bp, synthetic construct
  source 1..23: mol_type = other DNA
accagagtgcatccgcgtaggtg

SEQ ID NO: 3692 - DNA, 23 bp, synthetic construct
  source 1..23: mol_type = other DNA
caccagagtgcatccgcgtaggt

SEQ ID NO: 3693 - DNA, 23 bp, synthetic construct
  source 1..23: mol_type = other DNA
ccaccagagtgcatccgcgtagg

SEQ ID NO: 3694 - DNA, 23 bp, synthetic construct
  source 1..23: mol_type = other DNA
cccaccagagtgcatccgcgtag

SEQ ID NO: 3695 - DNA, 23 bp, synthetic construct
  source 1..23: mol_type = other DNA
ccccaccagagtgcatccgcgta

SEQ ID NO: 3696 - DNA, 23 bp, synthetic construct
  source 1..23: mol_type = other DNA
gccccaccagagtgcatccgcgt

SEQ ID NO: 3697 - DNA, 23 bp, synthetic construct
  source 1..23: mol_type = other DNA
ggccccaccagagtgcatccgcg

SEQ ID NO: 3698 - DNA, 23 bp, synthetic construct
  source 1..23: mol_type = other DNA
aggccccaccagagtgcatccgc

SEQ ID NO: 3699 - DNA, 23 bp, synthetic construct
  source 1..23: mol_type = other DNA
caggccccaccagagtgcatccg

SEQ ID NO: 3700 - DNA, 23 bp, synthetic construct
  source 1..23: mol_type = other DNA
ccaggccccaccagagtgcatcc

SEQ ID NO: 3701 - DNA, 23 bp, synthetic construct
  source 1..23: mol_type = other DNA
accaggccccaccagagtgcatc

SEQ ID NO: 3702 - DNA, 23 bp, synthetic construct
  source 1..23: mol_type = other DNA
caccaggccccaccagagtgcat

SEQ ID NO: 3703 - DNA, 23 bp, synthetic construct
  source 1..23: mol_type = other DNA
tcaccaggccccaccagagtgca

SEQ ID NO: 3704 - DNA, 23 bp, synthetic construct
  source 1..23: mol_type = other DNA
ctcaccaggccccaccagagtgc

SEQ ID NO: 3705 - DNA, 23 bp, synthetic construct
  source 1..23: mol_type = other DNA
actcaccaggccccaccagagtg

SEQ ID NO: 3706 - DNA, 23 bp, synthetic construct
  source 1..23: mol_type = other DNA
aactcaccaggccccaccagagt

SEQ ID NO: 3707 - DNA, 23 bp, synthetic construct
  source 1..23: mol_type = other DNA
caactcaccaggccccaccagag

SEQ ID NO: 3708 - DNA, 23 bp, synthetic construct
  source 1..23: mol_type = other DNA
acaactcaccaggccccaccaga

SEQ ID NO: 3709 - DNA, 23 bp, synthetic construct
  source 1..23: mol_type = other DNA
cacaactcaccaggccccaccag

SEQ ID NO: 3710 - DNA, 23 bp, synthetic construct
  source 1..23: mol_type = other DNA
ccacaactcaccaggccccacca

SEQ ID NO: 3711 - DNA, 23 bp, synthetic construct
  source 1..23: mol_type = other DNA
accacaactcaccaggccccacc

SEQ ID NO: 3712 - DNA, 23 bp, synthetic construct
  source 1..23: mol_type = other DNA
gaccacaactcaccaggccccac

SEQ ID NO: 3713 - DNA, 23 bp, synthetic construct
  source 1..23: mol_type = other DNA
tgaccacaactcaccaggcccca

SEQ ID NO: 3714 - DNA, 23 bp, synthetic construct
  source 1..23: mol_type = other DNA
atgaccacaactcaccaggcccc

SEQ ID NO: 3715 - DNA, 23 bp, synthetic construct
  source 1..23: mol_type = other DNA
aatgaccacaactcaccaggccc

SEQ ID NO: 3716 - DNA, 23 bp, synthetic construct
  source 1..23: mol_type = other DNA
caatgaccacaactcaccaggcc

SEQ ID NO: 3717 - DNA, 23 bp, synthetic construct
  source 1..23: mol_type = other DNA
acaatgaccacaactcaccaggc

SEQ ID NO: 3718 - DNA, 23 bp, synthetic construct
  source 1..23: mol_type = other DNA
cacaatgaccacaactcaccagg

SEQ ID NO: 3719 - DNA, 23 bp, synthetic construct
  source 1..23: mol_type = other DNA
ccacaatgaccacaactcaccag

SEQ ID NO: 3720 - DNA, 23 bp, synthetic construct
  source 1..23: mol_type = other DNA
accacaatgaccacaactcacca

SEQ ID NO: 3721 - DNA, 23 bp, synthetic construct
  source 1..23: mol_type = other DNA
aaccacaatgaccacaactcacc

SEQ ID NO: 3722 - DNA, 23 bp, synthetic construct
  source 1..23: mol_type = other DNA
aaaccacaatgaccacaactcac

SEQ ID NO: 3723 - DNA, 23 bp, synthetic construct
  source 1..23: mol_type = other DNA
aaaaccacaatgaccacaactca

SEQ ID NO: 3724 - DNA, 23 bp, synthetic construct
  source 1..23: mol_type = other DNA
gaaaaccacaatgaccacaactc

SEQ ID NO: 3725 - DNA, 23 bp, synthetic construct
  source 1..23: mol_type = other DNA
ggaaaaccacaatgaccacaact

SEQ ID NO: 3726 - DNA, 23 bp, synthetic construct
  source 1..23: mol_type = other DNA
gggaaaaccacaatgaccacaac

SEQ ID NO: 3727 - DNA, 23 bp, synthetic construct
  source 1..23: mol_type = other DNA
agggaaaaccacaatgaccacaa

SEQ ID NO: 3728 - DNA, 23 bp, synthetic construct
  source 1..23: mol_type = other DNA
aagggaaaaccacaatgaccaca

SEQ ID NO: 3729 - DNA, 23 bp, synthetic construct
  source 1..23: mol_type = other DNA
aaagggaaaaccacaatgaccac

SEQ ID NO: 3730 - DNA, 23 bp, synthetic construct
  source 1..23: mol_type = other DNA
gaaagggaaaaccacaatgacca

SEQ ID NO: 3731 - DNA, 23 bp, synthetic construct
  source 1..23: mol_type = other DNA
ggaaagggaaaaccacaatgacc

SEQ ID NO: 3732 - DNA, 23 bp, synthetic construct
  source 1..23: mol_type = other DNA
gggaaagggaaaaccacaatgac

SEQ ID NO: 3733 - DNA, 23 bp, synthetic construct
  source 1..23: mol_type = other DNA
agggaaagggaaaaccacaatga

SEQ ID NO: 3734 - DNA, 23 bp, synthetic construct
  source 1..23: mol_type = other DNA
cagggaaagggaaaaccacaatg

SEQ ID NO: 3735 - DNA, 23 bp, synthetic construct
  source 1..23: mol_type = other DNA
gcagggaaagggaaaaccacaat

SEQ ID NO: 3736 - DNA, 23 bp, synthetic construct
  source 1..23: mol_type = other DNA
agcagggaaagggaaaaccacaa

SEQ ID NO: 3737 - DNA, 23 bp, synthetic construct
  source 1..23: mol_type = other DNA
cagcagggaaagggaaaaccaca

SEQ ID NO: 3738 - DNA, 23 bp, synthetic construct
  source 1..23: mol_type = other DNA
tcagcagggaaagggaaaaccac

SEQ ID NO: 3739 - DNA, 23 bp, synthetic construct
  source 1..23: mol_type = other DNA
atcagcagggaaagggaaaacca

SEQ ID NO: 3740 - DNA, 23 bp, synthetic construct
  source 1..23: mol_type = other DNA
tatcagcagggaaagggaaaacc

SEQ ID NO: 3741 - DNA, 23 bp, synthetic construct
  source 1..23: mol_type = other DNA
gtatcagcagggaaagggaaaac

SEQ ID NO: 3742 - DNA, 23 bp, synthetic construct
  source 1..23: mol_type = other DNA
tgtatcagcagggaaagggaaaa

SEQ ID NO: 3743 - DNA, 23 bp, synthetic construct
  source 1..23: mol_type = other DNA
gtgtatcagcagggaaagggaaa

SEQ ID NO: 3744 - DNA, 23 bp, synthetic construct
  source 1..23: mol_type = other DNA
ggtgtatcagcagggaaagggaa

SEQ ID NO: 3745 - DNA, 23 bp, synthetic construct
  source 1..23: mol_type = other DNA
gggtgtatcagcagggaaaggga

SEQ ID NO: 3746 - DNA, 23 bp, synthetic construct
  source 1..23: mol_type = other DNA
ggggtgtatcagcagggaaaggg

SEQ ID NO: 3747 - DNA, 23 bp, synthetic construct
  source 1..23: mol_type = other DNA
aggggtgtatcagcagggaaagg

SEQ ID NO: 3748 - DNA, 23 bp, synthetic construct
  source 1..23: mol_type = other DNA
caggggtgtatcagcagggaaag

SEQ ID NO: 3749 - DNA, 23 bp, synthetic construct
  source 1..23: mol_type = other DNA
acaggggtgtatcagcagggaaa

SEQ ID NO: 3750 - DNA, 23 bp, synthetic construct
  source 1..23: mol_type = other DNA
gacaggggtgtatcagcagggaa

SEQ ID NO: 3751 - DNA, 23 bp, synthetic construct
  source 1..23: mol_type = other DNA
ggacaggggtgtatcagcaggga

SEQ ID NO: 3752 - DNA, 23 bp, synthetic construct
  source 1..23: mol_type = other DNA
gggacaggggtgtatcagcaggg

SEQ ID NO: 3753 - DNA, 23 bp, synthetic construct
  source 1..23: mol_type = other DNA
agggacaggggtgtatcagcagg

SEQ ID NO: 3754 - DNA, 23 bp, synthetic construct
  source 1..23: mol_type = other DNA
cagggacaggggtgtatcagcag

SEQ ID NO: 3755 - DNA, 23 bp, synthetic construct
  source 1..23: mol_type = other DNA
acagggacaggggtgtatcagca

SEQ ID NO: 3756 - DNA, 23 bp, synthetic construct
  source 1..23: mol_type = other DNA
cacagggacaggggtgtatcagc

SEQ ID NO: 3757 - DNA, 23 bp, synthetic construct
  source 1..23: mol_type = other DNA
gcacagggacaggggtgtatcag

SEQ ID NO: 3758 - DNA, 23 bp, synthetic construct
  source 1..23: mol_type = other DNA
agcacagggacaggggtgtatca

SEQ ID NO: 3759 - DNA, 23 bp, synthetic construct
  source 1..23: mol_type = other DNA
cagcacagggacaggggtgtatc

SEQ ID NO: 3760 - DNA, 23 bp, synthetic construct
  source 1..23: mol_type = other DNA
ccagcacagggacaggggtgtat

SEQ ID NO: 3761 - DNA, 23 bp, synthetic construct
  source 1..23: mol_type = other DNA
cccagcacagggacaggggtgta

SEQ ID NO: 3762 - DNA, 23 bp, synthetic construct
  source 1..23: mol_type = other DNA
tcccagcacagggacaggggtgt

SEQ ID NO: 3763 - DNA, 23 bp, synthetic construct
  source 1..23: mol_type = other DNA
gtcccagcacagggacaggggtg

SEQ ID NO: 3764 - DNA, 23 bp, synthetic construct
  source 1..23: mol_type = other DNA
ggtcccagcacagggacaggggt

SEQ ID NO: 3765 - DNA, 23 bp, synthetic construct
  source 1..23: mol_type = other DNA
tggtcccagcacagggacagggg

SEQ ID NO: 3766 - DNA, 23 bp, synthetic construct
  source 1..23: mol_type = other DNA
ctggtcccagcacagggacaggg

SEQ ID NO: 3767 - DNA, 23 bp, synthetic construct
  source 1..23: mol_type = other DNA
cctggtcccagcacagggacagg

SEQ ID NO: 3768 - DNA, 23 bp, synthetic construct
  source 1..23: mol_type = other DNA
gcctggtcccagcacagggacag

SEQ ID NO: 3769 - DNA, 23 bp, synthetic construct
  source 1..23: mol_type = other DNA
agcctggtcccagcacagggaca

SEQ ID NO: 3770 - DNA, 23 bp, synthetic construct
  source 1..23: mol_type = other DNA
gagcctggtcccagcacagggac

SEQ ID NO: 3771 - DNA, 23 bp, synthetic construct
  source 1..23: mol_type = other DNA
agagcctggtcccagcacaggga

SEQ ID NO: 3772 - DNA, 23 bp, synthetic construct
  source 1..23: mol_type = other DNA
gagagcctggtcccagcacaggg

SEQ ID NO: 3773 - DNA, 23 bp, synthetic construct
  source 1..23: mol_type = other DNA
tgagagcctggtcccagcacagg

SEQ ID NO: 3774 - DNA, 23 bp, synthetic construct
  source 1..23: mol_type = other DNA
gtgagagcctggtcccagcacag

SEQ ID NO: 3775 - DNA, 23 bp, synthetic construct
  source 1..23: mol_type = other DNA
agtgagagcctggtcccagcaca

SEQ ID NO: 3776 - DNA, 23 bp, synthetic construct
  source 1..23: mol_type = other DNA
cagtgagagcctggtcccagcac

SEQ ID NO: 3777 - DNA, 23 bp, synthetic construct
  source 1..23: mol_type = other DNA
ccagtgagagcctggtcccagca

SEQ ID NO: 3778 - DNA, 23 bp, synthetic construct
  source 1..23: mol_type = other DNA
gccagtgagagcctggtcccagc

SEQ ID NO: 3779 - DNA, 23 bp, synthetic construct
  source 1..23: mol_type = other DNA
agccagtgagagcctggtcccag

SEQ ID NO: 3780 - DNA, 23 bp, synthetic construct
  source 1..23: mol_type = other DNA
cagccagtgagagcctggtccca

SEQ ID NO: 3781 - DNA, 23 bp, synthetic construct
  source 1..23: mol_type = other DNA
tcagccagtgagagcctggtccc

SEQ ID NO: 3782 - DNA, 23 bp, synthetic construct
  source 1..23: mol_type = other DNA
ctcagccagtgagagcctggtcc

SEQ ID NO: 3783 - DNA, 23 bp, synthetic construct
  source 1..23: mol_type = other DNA
gctcagccagtgagagcctggtc

SEQ ID NO: 3784 - DNA, 23 bp, synthetic construct
  source 1..23: mol_type = other DNA
ggctcagccagtgagagcctggt

SEQ ID NO: 3785 - DNA, 23 bp, synthetic construct
  source 1..23: mol_type = other DNA
aggctcagccagtgagagcctgg

SEQ ID NO: 3786 - DNA, 23 bp, synthetic construct
  source 1..23: mol_type = other DNA
caggctcagccagtgagagcctg

SEQ ID NO: 3787 - DNA, 23 bp, synthetic construct
  source 1..23: mol_type = other DNA
gcaggctcagccagtgagagcct

SEQ ID NO: 3788 - DNA, 23 bp, synthetic construct
  source 1..23: mol_type = other DNA
agcaggctcagccagtgagagcc

SEQ ID NO: 3789 - DNA, 23 bp, synthetic construct
  source 1..23: mol_type = other DNA
gagcaggctcagccagtgagagc

SEQ ID NO: 3790 - DNA, 23 bp, synthetic construct
  source 1..23: mol_type = other DNA
ggagcaggctcagccagtgagag

SEQ ID NO: 3791 - DNA, 23 bp, synthetic construct
  source 1..23: mol_type = other DNA
tggagcaggctcagccagtgaga

SEQ ID NO: 3792 - DNA, 23 bp, synthetic construct
  source 1..23: mol_type = other DNA
atggagcaggctcagccagtgag

SEQ ID NO: 3793 - DNA, 23 bp, synthetic construct
  source 1..23: mol_type = other DNA
tatggagcaggctcagccagtga

SEQ ID NO: 3794 - DNA, 23 bp, synthetic construct
  source 1..23: mol_type = other DNA
gtatggagcaggctcagccagtg

SEQ ID NO: 3795 - DNA, 23 bp, synthetic construct
  source 1..23: mol_type = other DNA
tgtatggagcaggctcagccagt

SEQ ID NO: 3796 - DNA, 23 bp, synthetic construct
  source 1..23: mol_type = other DNA
atgtatggagcaggctcagccag

SEQ ID NO: 3797 - DNA, 23 bp, synthetic construct
  source 1..23: mol_type = other DNA
gatgtatggagcaggctcagcca

SEQ ID NO: 3798 - DNA, 23 bp, synthetic construct
  source 1..23: mol_type = other DNA
agatgtatggagcaggctcagcc

SEQ ID NO: 3799 - DNA, 23 bp, synthetic construct
  source 1..23: mol_type = other DNA
gagatgtatggagcaggctcagc

SEQ ID NO: 3800 - DNA, 23 bp, synthetic construct
  source 1..23: mol_type = other DNA
agagatgtatggagcaggctcag

SEQ ID NO: 3801 - DNA, 23 bp, synthetic construct
  source 1..23: mol_type = other DNA
aagagatgtatggagcaggctca

SEQ ID NO: 3802 - DNA, 23 bp, synthetic construct
  source 1..23: mol_type = other DNA
aaagagatgtatggagcaggctc

SEQ ID NO: 3803 - DNA, 23 bp, synthetic construct
  source 1..23: mol_type = other DNA
caaagagatgtatggagcaggct

SEQ ID NO: 3804 - DNA, 23 bp, synthetic construct
  source 1..23: mol_type = other DNA
ccaaagagatgtatggagcaggc

SEQ ID NO: 3805 - DNA, 23 bp, synthetic construct
  source 1..23: mol_type = other DNA
cccaaagagatgtatggagcagg

SEQ ID NO: 3806 - DNA, 23 bp, synthetic construct
  source 1..23: mol_type = other DNA
ccccaaagagatgtatggagcag

SEQ ID NO: 3807 - DNA, 23 bp, synthetic construct
  source 1..23: mol_type = other DNA
gccccaaagagatgtatggagca

SEQ ID NO: 3808 - DNA, 23 bp, synthetic construct
  source 1..23: mol_type = other DNA
ggccccaaagagatgtatggagc

SEQ ID NO: 3809 - DNA, 23 bp, synthetic construct
  source 1..23: mol_type = other DNA
tggccccaaagagatgtatggag

SEQ ID NO: 3810 - DNA, 23 bp, synthetic construct
  source 1..23: mol_type = other DNA
gtggccccaaagagatgtatgga

SEQ ID NO: 3811 - DNA, 23 bp, synthetic construct
  source 1..23: mol_type = other DNA
ggtggccccaaagagatgtatgg

SEQ ID NO: 3812 - DNA, 23 bp, synthetic construct
  source 1..23: mol_type = other DNA
aggtggccccaaagagatgtatg

SEQ ID NO: 3813 - DNA, 23 bp, synthetic construct
  source 1..23: mol_type = other DNA
caggtggccccaaagagatgtat

SEQ ID NO: 3814 - DNA, 23 bp, synthetic construct
  source 1..23: mol_type = other DNA
gcaggtggccccaaagagatgta

SEQ ID NO: 3815 - DNA, 23 bp, synthetic construct
  source 1..23: mol_type = other DNA
agcaggtggccccaaagagatgt

SEQ ID NO: 3816 - DNA, 23 bp, synthetic construct
  source 1..23: mol_type = other DNA
cagcaggtggccccaaagagatg

SEQ ID NO: 3817 - DNA, 23 bp, synthetic construct
  source 1..23: mol_type = other DNA
ccagcaggtggccccaaagagat

SEQ ID NO: 3818 - DNA, 23 bp, synthetic construct
  source 1..23: mol_type = other DNA
gccagcaggtggccccaaagaga

SEQ ID NO: 3819 - DNA, 23 bp, synthetic construct
  source 1..23: mol_type = other DNA
agccagcaggtggccccaaagag

SEQ ID NO: 3820 - DNA, 23 bp, synthetic construct
  source 1..23: mol_type = other DNA
cagccagcaggtggccccaaaga

SEQ ID NO: 3821 - DNA, 23 bp, synthetic construct
  source 1..23: mol_type = other DNA
gcagccagcaggtggccccaaag

SEQ ID NO: 3822 - DNA, 23 bp, synthetic construct
  source 1..23: mol_type = other DNA
ggcagccagcaggtggccccaaa

SEQ ID NO: 3823 - DNA, 23 bp, synthetic construct
  source 1..23: mol_type = other DNA
gggcagccagcaggtggccccaa

SEQ ID NO: 3824 - DNA, 23 bp, synthetic construct
  source 1..23: mol_type = other DNA
cgggcagccagcaggtggcccca

SEQ ID NO: 3825 - DNA, 23 bp, synthetic construct
  source 1..23: mol_type = other DNA
acgggcagccagcaggtggcccc

SEQ ID NO: 3826 - DNA, 23 bp, synthetic construct
  source 1..23: mol_type = other DNA
cacgggcagccagcaggtggccc

SEQ ID NO: 3827 - DNA, 23 bp, synthetic construct
  source 1..23: mol_type = other DNA
ccacgggcagccagcaggtggcc

SEQ ID NO: 3828 - DNA, 23 bp, synthetic construct
  source 1..23: mol_type = other DNA
accacgggcagccagcaggtggc

SEQ ID NO: 3829 - DNA, 23 bp, synthetic construct
  source 1..23: mol_type = other DNA
gaccacgggcagccagcaggtgg

SEQ ID NO: 3830 - DNA, 23 bp, synthetic construct
  source 1..23: mol_type = other DNA
tgaccacgggcagccagcaggtg

SEQ ID NO: 3831 - DNA, 23 bp, synthetic construct
  source 1..23: mol_type = other DNA
atgaccacgggcagccagcaggt

SEQ ID NO: 3832 - DNA, 23 bp, synthetic construct
  source 1..23: mol_type = other DNA
catgaccacgggcagccagcagg

SEQ ID NO: 3833 - DNA, 23 bp, synthetic construct
  source 1..23: mol_type = other DNA
tcatgaccacgggcagccagcag

SEQ ID NO: 3834 - DNA, 23 bp, synthetic construct
  source 1..23: mol_type = other DNA
atcatgaccacgggcagccagca

SEQ ID NO: 3835 - DNA, 23 bp, synthetic construct
  source 1..23: mol_type = other DNA
catcatgaccacgggcagccagc

SEQ ID NO: 3836 - DNA, 23 bp, synthetic construct
  source 1..23: mol_type = other DNA
ccatcatgaccacgggcagccag

SEQ ID NO: 3837 - DNA, 23 bp, synthetic construct
  source 1..23: mol_type = other DNA
gccatcatgaccacgggcagcca

SEQ ID NO: 3838 - DNA, 23 bp, synthetic construct
  source 1..23: mol_type = other DNA
agccatcatgaccacgggcagcc

SEQ ID NO: 3839 - DNA, 23 bp, synthetic construct
  source 1..23: mol_type = other DNA
aagccatcatgaccacgggcagc

SEQ ID NO: 3840 - DNA, 23 bp, synthetic construct
  source 1..23: mol_type = other DNA
caagccatcatgaccacgggcag

SEQ ID NO: 3841 - DNA, 23 bp, synthetic construct
  source 1..23: mol_type = other DNA
acaagccatcatgaccacgggca

SEQ ID NO: 3842 - DNA, 23 bp, synthetic construct
  source 1..23: mol_type = other DNA
cacaagccatcatgaccacgggc

SEQ ID NO: 3843 - DNA, 23 bp, synthetic construct
  source 1..23: mol_type = other DNA
ccacaagccatcatgaccacggg

SEQ ID NO: 3844 - DNA, 23 bp, synthetic construct
  source 1..23: mol_type = other DNA
accacaagccatcatgaccacgg

SEQ ID NO: 3845 - DNA, 23 bp, synthetic construct
  source 1..23: mol_type = other DNA
gaccacaagccatcatgaccacg

SEQ ID NO: 3846 - DNA, 23 bp, synthetic construct
  source 1..23: mol_type = other DNA
cgaccacaagccatcatgaccac

SEQ ID NO: 3847 - DNA, 23 bp, synthetic construct
  source 1..23: mol_type = other DNA
tcgaccacaagccatcatgacca

SEQ ID NO: 3848 - DNA, 23 bp, synthetic construct
  source 1..23: mol_type = other DNA
ctcgaccacaagccatcatgacc

SEQ ID NO: 3849 - DNA, 23 bp, synthetic construct
  source 1..23: mol_type = other DNA
cctcgaccacaagccatcatgac

SEQ ID NO: 3850 - DNA, 23 bp, synthetic construct
  source 1..23: mol_type = other DNA
gcctcgaccacaagccatcatga

SEQ ID NO: 3851 - DNA, 23 bp, synthetic construct
  source 1..23: mol_type = other DNA
cgcctcgaccacaagccatcatg

SEQ ID NO: 3852 - DNA, 23 bp, synthetic construct
  source 1..23: mol_type = other DNA
ccgcctcgaccacaagccatcat

SEQ ID NO: 3853 - DNA, 23 bp, synthetic construct
  source 1..23: mol_type = other DNA
cccgcctcgaccacaagccatca

SEQ ID NO: 3854 - DNA, 23 bp, synthetic construct
  source 1..23: mol_type = other DNA
ccccgcctcgaccacaagccatc

SEQ ID NO: 3855 - DNA, 23 bp, synthetic construct
  source 1..23: mol_type = other DNA
accccgcctcgaccacaagccat

SEQ ID NO: 3856 - DNA, 23 bp, synthetic construct
  source 1..23: mol_type = other DNA
caccccgcctcgaccacaagcca

SEQ ID NO: 3857 - DNA, 23 bp, synthetic construct
  source 1..23: mol_type = other DNA
ccaccccgcctcgaccacaagcc

SEQ ID NO: 3858 - DNA, 23 bp, synthetic construct
  source 1..23: mol_type = other DNA
accaccccgcctcgaccacaagc

SEQ ID NO: 3859 - DNA, 23 bp, synthetic construct
  source 1..23: mol_type = other DNA
caccaccccgcctcgaccacaag

SEQ ID NO: 3860 - DNA, 23 bp, synthetic construct
  source 1..23: mol_type = other DNA
ccaccaccccgcctcgaccacaa

SEQ ID NO: 3861 - DNA, 23 bp, synthetic construct
  source 1..23: mol_type = other DNA
accaccaccccgcctcgaccaca

SEQ ID NO: 3862 - DNA, 23 bp, synthetic construct
  source 1..23: mol_type = other DNA
aaccaccaccccgcctcgaccac

SEQ ID NO: 3863 - DNA, 23 bp, synthetic construct
  source 1..23: mol_type = other DNA
caaccaccaccccgcctcgacca

SEQ ID NO: 3864 - DNA, 23 bp, synthetic construct
  source 1..23: mol_type = other DNA
gcaaccaccaccccgcctcgacc

SEQ ID NO: 3865 - DNA, 23 bp, synthetic construct
  source 1..23: mol_type = other DNA
ggcaaccaccaccccgcctcgac

SEQ ID NO: 3866 - DNA, 23 bp, synthetic construct
  source 1..23: mol_type = other DNA
tggcaaccaccaccccgcctcga

SEQ ID NO: 3867 - DNA, 23 bp, synthetic construct
  source 1..23: mol_type = other DNA
ttggcaaccaccaccccgcctcg

SEQ ID NO: 3868 - DNA, 23 bp, synthetic construct
  source 1..23: mol_type = other DNA
cttggcaaccaccaccccgcctc

SEQ ID NO: 3869 - DNA, 23 bp, synthetic construct
  source 1..23: mol_type = other DNA
gcttggcaaccaccaccccgcct

SEQ ID NO: 3870 - DNA, 23 bp, synthetic construct
  source 1..23: mol_type = other DNA
agcttggcaaccaccaccccgcc

SEQ ID NO: 3871 - DNA, 23 bp, synthetic construct
  source 1..23: mol_type = other DNA
cagcttggcaaccaccaccccgc

SEQ ID NO: 3872 - DNA, 23 bp, synthetic construct
  source 1..23: mol_type = other DNA
ccagcttggcaaccaccaccccg

SEQ ID NO: 3873 - DNA, 23 bp, synthetic construct
  source 1..23: mol_type = other DNA
gccagcttggcaaccaccacccc

SEQ ID NO: 3874 - DNA, 23 bp, synthetic construct
  source 1..23: mol_type = other DNA
cgccagcttggcaaccaccaccc

SEQ ID NO: 3875 - DNA, 23 bp, synthetic construct
  source 1..23: mol_type = other DNA
ccgccagcttggcaaccaccacc

SEQ ID NO: 3876 - DNA, 23 bp, synthetic construct
  source 1..23: mol_type = other DNA
cccgccagcttggcaaccaccac

SEQ ID NO: 3877 - DNA, 23 bp, synthetic construct
  source 1..23: mol_type = other DNA
ccccgccagcttggcaaccacca

SEQ ID NO: 3878 - DNA, 23 bp, synthetic construct
  source 1..23: mol_type = other DNA
cccccgccagcttggcaaccacc

SEQ ID NO: 3879 - DNA, 23 bp, synthetic construct
  source 1..23: mol_type = other DNA
tcccccgccagcttggcaaccac

SEQ ID NO: 3880 - DNA, 23 bp, synthetic construct
  source 1..23: mol_type = other DNA
ctcccccgccagcttggcaacca

SEQ ID NO: 3881 - DNA, 23 bp, synthetic construct
  source 1..23: mol_type = other DNA
actcccccgccagcttggcaacc

SEQ ID NO: 3882 - DNA, 23 bp, synthetic construct
  source 1..23: mol_type = other DNA
cactcccccgccagcttggcaac

SEQ ID NO: 3883 - DNA, 23 bp, synthetic construct
  source 1..23: mol_type = other DNA
ccactcccccgccagcttggcaa

SEQ ID NO: 3884 - DNA, 23 bp, synthetic construct
  source 1..23: mol_type = other DNA
cccactcccccgccagcttggca

SEQ ID NO: 3885 - DNA, 23 bp, synthetic construct
  source 1..23: mol_type = other DNA
acccactcccccgccagcttggc

SEQ ID NO: 3886 - DNA, 23 bp, synthetic construct
  source 1..23: mol_type = other DNA
cacccactcccccgccagcttgg

SEQ ID NO: 3887 - DNA, 23 bp, synthetic construct
  source 1..23: mol_type = other DNA
ccacccactcccccgccagcttg

SEQ ID NO: 3888 - DNA, 23 bp, synthetic construct
  source 1..23: mol_type = other DNA
cccacccactcccccgccagctt

SEQ ID NO: 3889 - DNA, 23 bp, synthetic construct
  source 1..23: mol_type = other DNA
ccccacccactcccccgccagct

SEQ ID NO: 3890 - RNA, 23 nt, synthetic construct
  source 1..23: mol_type = other RNA
tccccacccactcccccgccagc

SEQ ID NO: 3891 - RNA, 23 nt, synthetic construct
  source 1..23: mol_type = other RNA
ctccccacccactcccccgccag

SEQ ID NO: 3892 - RNA, 23 nt, synthetic construct
  source 1..23: mol_type = other RNA
cctccccacccactcccccgcca

SEQ ID NO: 3893 - RNA, 23 nt, synthetic construct
  source 1..23: mol_type = other RNA
ccctccccacccactcccccgcc

SEQ ID NO: 3894 - RNA, 23 nt, synthetic construct
  source 1..23: mol_type = other RNA
gccctccccacccactcccccgc

SEQ ID NO: 3895 - RNA, 23 nt, synthetic construct
  source 1..23: mol_type = other RNA
agccctccccacccactcccccg

SEQ ID NO: 3896 - RNA, 23 nt, synthetic construct
  source 1..23: mol_type = other RNA
cagccctccccacccactccccc

SEQ ID NO: 3897 - RNA, 23 nt, synthetic construct
  source 1..23: mol_type = other RNA
ccagccctccccacccactcccc

SEQ ID NO: 3898 - RNA, 23 nt, synthetic construct
  source 1..23: mol_type = other RNA
cccagccctccccacccactccc

SEQ ID NO: 3899 - RNA, 23 nt, synthetic construct
  source 1..23: mol_type = other RNA
gcccagccctccccacccactcc

SEQ ID NO: 3900 - DNA, 23 bp, Homo sapiens
  source 1..23: mol_type = genomic DNA
gatgatggtggtggtggtggtga

SEQ ID NO: 3901 - DNA, 23 bp, Homo sapiens
  source 1..23: mol_type = genomic DNA
atgatggtggtggtggtggtgat

SEQ ID NO: 3902 - DNA, 23 bp, Homo sapiens
  source 1..23: mol_type = genomic DNA
tgatggtggtggtggtggtgatg

SEQ ID NO: 3903 - DNA, 23 bp, Homo sapiens
  source 1..23: mol_type = genomic DNA
gatggtggtggtggtggtgatgg

SEQ ID NO: 3904 - DNA, 23 bp, Homo sapiens
  source 1..23: mol_type = genomic DNA
atggtggtggtggtggtgatggt

SEQ ID NO: 3905 - DNA, 23 bp, Homo sapiens
  source 1..23: mol_type = genomic DNA
tggtggtggtggtggtgatggtg

SEQ ID NO: 3906 - DNA, 23 bp, Homo sapiens
  source 1..23: mol_type = genomic DNA
ggtggtggtggtggtgatggtga

SEQ ID NO: 3907 - DNA, 23 bp, Homo sapiens
  source 1..23: mol_type = genomic DNA
gtggtggtggtggtgatggtgat

SEQ ID NO: 3908 - DNA, 23 bp, Homo sapiens
  source 1..23: mol_type = genomic DNA
tggtggtggtggtgatggtgatg

SEQ ID NO: 3909 - DNA, 23 bp, Homo sapiens
  source 1..23: mol_type = genomic DNA
ggtggtggtggtgatggtgatgg

SEQ ID NO: 3910 - DNA, 23 bp, Homo sapiens
  source 1..23: mol_type = genomic DNA
gtggtggtggtgatggtgatggt

SEQ ID NO: 3911 - DNA, 23 bp, Homo sapiens
  source 1..23: mol_type = genomic DNA
tggtggtggtgatggtgatggtg

SEQ ID NO: 3912 - DNA, 23 bp, Homo sapiens
  source 1..23: mol_type = genomic DNA
ggtggtggtgatggtgatggtgg

SEQ ID NO: 3913 - DNA, 23 bp, Homo sapiens
  source 1..23: mol_type = genomic DNA
gtggtggtgatggtgatggtggt

SEQ ID NO: 3914 - DNA, 23 bp, Homo sapiens
  source 1..23: mol_type = genomic DNA
tggtggtgatggtgatggtggtg

SEQ ID NO: 3915 - DNA, 23 bp, Homo sapiens
  source 1..23: mol_type = genomic DNA
ggtggtgatggtgatggtggtga

SEQ ID NO: 3916 - DNA, 23 bp, Homo sapiens
  source 1..23: mol_type = genomic DNA
gtggtgatggtgatggtggtgat

SEQ ID NO: 3917 - DNA, 23 bp, Homo sapiens
  source 1..23: mol_type = genomic DNA
tggtgatggtgatggtggtgatg

SEQ ID NO: 3918 - DNA, 23 bp, Homo sapiens
  source 1..23: mol_type = genomic DNA
ggtgatggtgatggtggtgatgg

SEQ ID NO: 3919 - DNA, 23 bp, Homo sapiens
  source 1..23: mol_type = genomic DNA
gtgatggtgatggtggtgatggt

SEQ ID NO: 3920 - DNA, 23 bp, Homo sapiens
  source 1..23: mol_type = genomic DNA
tgatggtgatggtggtgatggtg

SEQ ID NO: 3921 - DNA, 23 bp, Homo sapiens
  source 1..23: mol_type = genomic DNA
gatggtgatggtggtgatggtga

SEQ ID NO: 3922 - DNA, 23 bp, Homo sapiens
  source 1..23: mol_type = genomic DNA
atggtgatggtggtgatggtgat

SEQ ID NO: 3923 - DNA, 23 bp, Homo sapiens
  source 1..23: mol_type = genomic DNA
tggtgatggtggtgatggtgatg

SEQ ID NO: 3924 - DNA, 23 bp, Homo sapiens
  source 1..23: mol_type = genomic DNA
ggtgatggtggtgatggtgatgg

SEQ ID NO: 3925 - DNA, 23 bp, Homo sapiens
  source 1..23: mol_type = genomic DNA
gtgatggtggtgatggtgatggt

SEQ ID NO: 3926 - DNA, 23 bp, Homo sapiens
  source 1..23: mol_type = genomic DNA
tgatggtggtgatggtgatggtg

SEQ ID NO: 3927 - DNA, 23 bp, Homo sapiens
  source 1..23: mol_type = genomic DNA
gatggtggtgatggtgatggtgg

SEQ ID NO: 3928 - DNA, 23 bp, Homo sapiens
  source 1..23: mol_type = genomic DNA
atggtggtgatggtgatggtggt

SEQ ID NO: 3929 - DNA, 23 bp, Homo sapiens
  source 1..23: mol_type = genomic DNA
tggtggtgatggtgatggtggtg

SEQ ID NO: 3930 - DNA, 23 bp, Homo sapiens
  source 1..23: mol_type = genomic DNA
ggtggtgatggtgatggtggtgg

SEQ ID NO: 3931 - DNA, 23 bp, Homo sapiens
  source 1..23: mol_type = genomic DNA
gtggtgatggtgatggtggtggt

SEQ ID NO: 3932 - DNA, 23 bp, Homo sapiens
  source 1..23: mol_type = genomic DNA
tggtgatggtgatggtggtggtg

SEQ ID NO: 3933 - DNA, 23 bp, Homo sapiens
  source 1..23: mol_type = genomic DNA
ggtgatggtgatggtggtggtgg

SEQ ID NO: 3934 - DNA, 23 bp, Homo sapiens
  source 1..23: mol_type = genomic DNA
gtgatggtgatggtggtggtggt

SEQ ID NO: 3935 - DNA, 23 bp, Homo sapiens
  source 1..23: mol_type = genomic DNA
tgatggtgatggtggtggtggtg

SEQ ID NO: 3936 - DNA, 23 bp, Homo sapiens
  source 1..23: mol_type = genomic DNA
gatggtgatggtggtggtggtgg

SEQ ID NO: 3937 - DNA, 23 bp, Homo sapiens
  source 1..23: mol_type = genomic DNA
atggtgatggtggtggtggtggt

SEQ ID NO: 3938 - DNA, 23 bp, Homo sapiens
  source 1..23: mol_type = genomic DNA
tggtgatggtggtggtggtggtg

SEQ ID NO: 3939 - DNA, 23 bp, Homo sapiens
  source 1..23: mol_type = genomic DNA
ggtgatggtggtggtggtggtgg

SEQ ID NO: 3940 - DNA, 23 bp, Homo sapiens
  source 1..23: mol_type = genomic DNA
gtgatggtggtggtggtggtggt

SEQ ID NO: 3941 - DNA, 23 bp, Homo sapiens
  source 1..23: mol_type = genomic DNA
tgatggtggtggtggtggtggtg

SEQ ID NO: 3942 - DNA, 23 bp, Homo sapiens
  source 1..23: mol_type = genomic DNA
gatggtggtggtggtggtggtgg

SEQ ID NO: 3943 - DNA, 23 bp, Homo sapiens
  source 1..23: mol_type = genomic DNA
atggtggtggtggtggtggtggt

SEQ ID NO: 3944 - DNA, 23 bp, Homo sapiens
  source 1..23: mol_type = genomic DNA
tggtggtggtggtggtggtggtg

SEQ ID NO: 3945 - DNA, 23 bp, Homo sapiens
  source 1..23: mol_type = genomic DNA
ggtggtggtggtggtggtggtga

SEQ ID NO: 3946 - DNA, 23 bp, Homo sapiens
  source 1..23: mol_type = genomic DNA
gtggtggtggtggtggtggtgat

SEQ ID NO: 3947 - DNA, 23 bp, Homo sapiens
  source 1..23: mol_type = genomic DNA
tggtggtggtggtggtggtgatg

SEQ ID NO: 3948 - DNA, 23 bp, Homo sapiens
  source 1..23: mol_type = genomic DNA
ggtggtggtggtggtggtgatgg

SEQ ID NO: 3949 - DNA, 23 bp, Homo sapiens
  source 1..23: mol_type = genomic DNA
gtggtggtggtggtggtgatggt

SEQ ID NO: 3950 - DNA, 23 bp, Homo sapiens
  source 1..23: mol_type = genomic DNA
tggtggtggtggtggtgatggtg

SEQ ID NO: 3951 - DNA, 23 bp, Homo sapiens
  source 1..23: mol_type = genomic DNA
ggtggtggtggtggtgatggtgg

SEQ ID NO: 3952 - DNA, 23 bp, Homo sapiens
  source 1..23: mol_type = genomic DNA
gtggtggtggtggtgatggtggt

SEQ ID NO: 3953 - DNA, 23 bp, Homo sapiens
  source 1..23: mol_type = genomic DNA
tggtggtggtggtgatggtggtg

SEQ ID NO: 3954 - DNA, 23 bp, Homo sapiens
  source 1..23: mol_type = genomic DNA
ggtggtggtggtgatggtggtgg

SEQ ID NO: 3955 - DNA, 23 bp, Homo sapiens
  source 1..23: mol_type = genomic DNA
gtggtggtggtgatggtggtggt

SEQ ID NO: 3956 - DNA, 23 bp, Homo sapiens
  source 1..23: mol_type = genomic DNA
tggtggtggtgatggtggtggtg

SEQ ID NO: 3957 - DNA, 23 bp, Homo sapiens
  source 1..23: mol_type = genomic DNA
ggtggtggtgatggtggtggtga

SEQ ID NO: 3958 - DNA, 23 bp, Homo sapiens
  source 1..23: mol_type = genomic DNA
gtggtggtgatggtggtggtgat

SEQ ID NO: 3959 - DNA, 23 bp, Homo sapiens
  source 1..23: mol_type = genomic DNA
tggtggtgatggtggtggtgatg

SEQ ID NO: 3960 - DNA, 23 bp, Homo sapiens
  source 1..23: mol_type = genomic DNA
ggtggtgatggtggtggtgatgg

SEQ ID NO: 3961 - DNA, 23 bp, Homo sapiens
  source 1..23: mol_type = genomic DNA
gtggtgatggtggtggtgatggt

SEQ ID NO: 3962 - DNA, 23 bp, Homo sapiens
  source 1..23: mol_type = genomic DNA
tggtgatggtggtggtgatggtt

SEQ ID NO: 3963 - DNA, 23 bp, Homo sapiens
  source 1..23: mol_type = genomic DNA
ggtgatggtggtggtgatggttt

SEQ ID NO: 3964 - DNA, 23 bp, Homo sapiens
  source 1..23: mol_type = genomic DNA
gtgatggtggtggtgatggtttt

SEQ ID NO: 3965 - DNA, 23 bp, Homo sapiens
  source 1..23: mol_type = genomic DNA
tgatggtggtggtgatggttttg

SEQ ID NO: 3966 - DNA, 23 bp, Homo sapiens
  source 1..23: mol_type = genomic DNA
gatggtggtggtgatggttttgg

SEQ ID NO: 3967 - DNA, 23 bp, Homo sapiens
  source 1..23: mol_type = genomic DNA
atggtggtggtgatggttttggt

SEQ ID NO: 3968 - DNA, 23 bp, Homo sapiens
  source 1..23: mol_type = genomic DNA
tggtggtggtgatggttttggtg

SEQ ID NO: 3969 - DNA, 23 bp, Homo sapiens
  source 1..23: mol_type = genomic DNA
ggtggtggtgatggttttggtgg

SEQ ID NO: 3970 - DNA, 23 bp, Homo sapiens
  source 1..23: mol_type = genomic DNA
gtggtggtgatggttttggtggt

SEQ ID NO: 3971 - DNA, 23 bp, Homo sapiens
  source 1..23: mol_type = genomic DNA
tggtggtgatggttttggtggtg

SEQ ID NO: 3972 - DNA, 23 bp, Homo sapiens
  source 1..23: mol_type = genomic DNA
ggtggtgatggttttggtggtgg

SEQ ID NO: 3973 - DNA, 23 bp, Homo sapiens
  source 1..23: mol_type = genomic DNA
gtggtgatggttttggtggtggt

SEQ ID NO: 3974 - DNA, 23 bp, Homo sapiens
  source 1..23: mol_type = genomic DNA
tggtgatggttttggtggtggtg

SEQ ID NO: 3975 - DNA, 23 bp, Homo sapiens
  source 1..23: mol_type = genomic DNA
ggtgatggttttggtggtggtga

SEQ ID NO: 3976 - DNA, 23 bp, Homo sapiens
  source 1..23: mol_type = genomic DNA
gtgatggttttggtggtggtgat

SEQ ID NO: 3977 - DNA, 23 bp, Homo sapiens
  source 1..23: mol_type = genomic DNA
tgatggttttggtggtggtgatg

SEQ ID NO: 3978 - DNA, 23 bp, Homo sapiens
  source 1..23: mol_type = genomic DNA
gatggttttggtggtggtgatgg

SEQ ID NO: 3979 - DNA, 23 bp, Homo sapiens
  source 1..23: mol_type = genomic DNA
atggttttggtggtggtgatggt

SEQ ID NO: 3980 - DNA, 23 bp, Homo sapiens
  source 1..23: mol_type = genomic DNA
tggttttggtggtggtgatggtg

SEQ ID NO: 3981 - DNA, 23 bp, Homo sapiens
  source 1..23: mol_type = genomic DNA
ggttttggtggtggtgatggtgg

SEQ ID NO: 3982 - DNA, 23 bp, Homo sapiens
  source 1..23: mol_type = genomic DNA
gttttggtggtggtgatggtggt

SEQ ID NO: 3983 - DNA, 23 bp, Homo sapiens
  source 1..23: mol_type = genomic DNA
ttttggtggtggtgatggtggtc

SEQ ID NO: 3984 - DNA, 23 bp, Homo sapiens
  source 1..23: mol_type = genomic DNA
tttggtggtggtgatggtggtca

SEQ ID NO: 3985 - DNA, 23 bp, Homo sapiens
  source 1..23: mol_type = genomic DNA
ttggtggtggtgatggtggtcat

SEQ ID NO: 3986 - DNA, 23 bp, Homo sapiens
  source 1..23: mol_type = genomic DNA
tggtggtggtgatggtggtcatg

SEQ ID NO: 3987 - DNA, 23 bp, Homo sapiens
  source 1..23: mol_type = genomic DNA
ggtggtggtgatggtggtcatgg

SEQ ID NO: 3988 - DNA, 23 bp, Homo sapiens
  source 1..23: mol_type = genomic DNA
gtggtggtgatggtggtcatggt

SEQ ID NO: 3989 - DNA, 23 bp, Homo sapiens
  source 1..23: mol_type = genomic DNA
tggtggtgatggtggtcatggtg

SEQ ID NO: 3990 - DNA, 23 bp, Homo sapiens
  source 1..23: mol_type = genomic DNA
ggtggtgatggtggtcatggtgt

SEQ ID NO: 3991 - DNA, 23 bp, Homo sapiens
  source 1..23: mol_type = genomic DNA
gtggtgatggtggtcatggtgtt

SEQ ID NO: 3992 - DNA, 23 bp, Homo sapiens
  source 1..23: mol_type = genomic DNA
tggtgatggtggtcatggtgttg

SEQ ID NO: 3993 - DNA, 23 bp, Homo sapiens
  source 1..23: mol_type = genomic DNA
ggtgatggtggtcatggtgttga

SEQ ID NO: 3994 - DNA, 23 bp, Homo sapiens
  source 1..23: mol_type = genomic DNA
gtgatggtggtcatggtgttgat

SEQ ID NO: 3995 - DNA, 23 bp, Homo sapiens
  source 1..23: mol_type = genomic DNA
tgatggtggtcatggtgttgatg

SEQ ID NO: 3996 - DNA, 23 bp, Homo sapiens
  source 1..23: mol_type = genomic DNA
gatggtggtcatggtgttgatgt

SEQ ID NO: 3997 - DNA, 23 bp, Homo sapiens
  source 1..23: mol_type = genomic DNA
atggtggtcatggtgttgatgtg

SEQ ID NO: 3998 - DNA, 23 bp, Homo sapiens
  source 1..23: mol_type = genomic DNA
tggtggtcatggtgttgatgtga

SEQ ID NO: 3999 - DNA, 23 bp, Homo sapiens
  source 1..23: mol_type = genomic DNA
ggtggtcatggtgttgatgtgat

SEQ ID NO: 4000 - DNA, 23 bp, Homo sapiens
  source 1..23: mol_type = genomic DNA
gtggtcatggtgttgatgtgatg

SEQ ID NO: 4001 - DNA, 23 bp, Homo sapiens
  source 1..23: mol_type = genomic DNA
tggtcatggtgttgatgtgatgg

SEQ ID NO: 4002 - DNA, 23 bp, Homo sapiens
  source 1..23: mol_type = genomic DNA
ggtcatggtgttgatgtgatggt

SEQ ID NO: 4003 - DNA, 23 bp, Homo sapiens
  source 1..23: mol_type = genomic DNA
gtcatggtgttgatgtgatggtg

SEQ ID NO: 4004 - DNA, 23 bp, Homo sapiens
  source 1..23: mol_type = genomic DNA
tcatggtgttgatgtgatggtgg

SEQ ID NO: 4005 - DNA, 23 bp, Homo sapiens
  source 1..23: mol_type = genomic DNA
catggtgttgatgtgatggtggt

SEQ ID NO: 4006 - DNA, 23 bp, Homo sapiens
  source 1..23: mol_type = genomic DNA
atggtgttgatgtgatggtggtg

SEQ ID NO: 4007 - DNA, 23 bp, Homo sapiens
  source 1..23: mol_type = genomic DNA
tggtgttgatgtgatggtggtgg

SEQ ID NO: 4008 - DNA, 23 bp, Homo sapiens
  source 1..23: mol_type = genomic DNA
ggtgttgatgtgatggtggtggt

SEQ ID NO: 4009 - DNA, 23 bp, Homo sapiens
  source 1..23: mol_type = genomic DNA
gtgttgatgtgatggtggtggtg

SEQ ID NO: 4010 - DNA, 23 bp, Homo sapiens
  source 1..23: mol_type = genomic DNA
tgttgatgtgatggtggtggtgt

SEQ ID NO: 4011 - DNA, 23 bp, Homo sapiens
  source 1..23: mol_type = genomic DNA
gttgatgtgatggtggtggtgtt

SEQ ID NO: 4012 - DNA, 23 bp, Homo sapiens
  source 1..23: mol_type = genomic DNA
ttgatgtgatggtggtggtgttg

SEQ ID NO: 4013 - DNA, 23 bp, Homo sapiens
  source 1..23: mol_type = genomic DNA
tgatgtgatggtggtggtgttgg

SEQ ID NO: 4014 - DNA, 23 bp, Homo sapiens
  source 1..23: mol_type = genomic DNA
gatgtgatggtggtggtgttggt

SEQ ID NO: 4015 - DNA, 23 bp, Homo sapiens
  source 1..23: mol_type = genomic DNA
atgtgatggtggtggtgttggtg

SEQ ID NO: 4016 - DNA, 23 bp, Homo sapiens
  source 1..23: mol_type = genomic DNA
tgtgatggtggtggtgttggtgg

SEQ ID NO: 4017 - DNA, 23 bp, Homo sapiens
  source 1..23: mol_type = genomic DNA
gtgatggtggtggtgttggtggt

SEQ ID NO: 4018 - DNA, 23 bp, Homo sapiens
  source 1..23: mol_type = genomic DNA
tgatggtggtggtgttggtggtg

SEQ ID NO: 4019 - DNA, 23 bp, Homo sapiens
  source 1..23: mol_type = genomic DNA
gatggtggtggtgttggtggtgg

SEQ ID NO: 4020 - DNA, 23 bp, Homo sapiens
  source 1..23: mol_type = genomic DNA
atggtggtggtgttggtggtggt

SEQ ID NO: 4021 - DNA, 23 bp, Homo sapiens
  source 1..23: mol_type = genomic DNA
tggtggtggtgttggtggtggtg

SEQ ID NO: 4022 - DNA, 23 bp, Homo sapiens
  source 1..23: mol_type = genomic DNA
ggtggtggtgttggtggtggtga

SEQ ID NO: 4023 - DNA, 23 bp, Homo sapiens
  source 1..23: mol_type = genomic DNA
gtggtggtgttggtggtggtgat

SEQ ID NO: 4024 - DNA, 23 bp, Homo sapiens
  source 1..23: mol_type = genomic DNA
tggtggtgttggtggtggtgatg

SEQ ID NO: 4025 - DNA, 23 bp, Homo sapiens
  source 1..23: mol_type = genomic DNA
ggtggtgttggtggtggtgatgg

SEQ ID NO: 4026 - DNA, 23 bp, Homo sapiens
  source 1..23: mol_type = genomic DNA
gtggtgttggtggtggtgatggt

SEQ ID NO: 4027 - DNA, 23 bp, Homo sapiens
  source 1..23: mol_type = genomic DNA
tggtgttggtggtggtgatggtg

SEQ ID NO: 4028 - DNA, 23 bp, Homo sapiens
  source 1..23: mol_type = genomic DNA
ggtgttggtggtggtgatggtga

SEQ ID NO: 4029 - DNA, 23 bp, Homo sapiens
  source 1..23: mol_type = genomic DNA
gtgttggtggtggtgatggtgat

SEQ ID NO: 4030 - DNA, 23 bp, Homo sapiens
  source 1..23: mol_type = genomic DNA
tgttggtggtggtgatggtgatg

SEQ ID NO: 4031 - DNA, 23 bp, Homo sapiens
  source 1..23: mol_type = genomic DNA
gttggtggtggtgatggtgatgc

SEQ ID NO: 4032 - DNA, 23 bp, Homo sapiens
  source 1..23: mol_type = genomic DNA
ttggtggtggtgatggtgatgct

SEQ ID NO: 4033 - DNA, 23 bp, Homo sapiens
  source 1..23: mol_type = genomic DNA
tggtggtggtgatggtgatgctt

SEQ ID NO: 4034 - DNA, 23 bp, Homo sapiens
  source 1..23: mol_type = genomic DNA
ggtggtggtgatggtgatgcttc

SEQ ID NO: 4035 - DNA, 23 bp, Homo sapiens
  source 1..23: mol_type = genomic DNA
gtggtggtgatggtgatgcttct

SEQ ID NO: 4036 - DNA, 23 bp, Homo sapiens
  source 1..23: mol_type = genomic DNA
tggtggtgatggtgatgcttctg

SEQ ID NO: 4037 - DNA, 23 bp, Homo sapiens
  source 1..23: mol_type = genomic DNA
ggtggtgatggtgatgcttctgg

SEQ ID NO: 4038 - DNA, 23 bp, Homo sapiens
  source 1..23: mol_type = genomic DNA
gtggtgatggtgatgcttctggt

SEQ ID NO: 4039 - DNA, 23 bp, Homo sapiens
  source 1..23: mol_type = genomic DNA
tggtgatggtgatgcttctggtg

SEQ ID NO: 4040 - DNA, 23 bp, Homo sapiens
  source 1..23: mol_type = genomic DNA
ggtgatggtgatgcttctggtga

SEQ ID NO: 4041 - DNA, 23 bp, Homo sapiens
  source 1..23: mol_type = genomic DNA
gtgatggtgatgcttctggtgat

SEQ ID NO: 4042 - DNA, 23 bp, Homo sapiens
  source 1..23: mol_type = genomic DNA
tgatggtgatgcttctggtgatg

SEQ ID NO: 4043 - DNA, 23 bp, Homo sapiens
  source 1..23: mol_type = genomic DNA
gatggtgatgcttctggtgatgg

SEQ ID NO: 4044 - DNA, 23 bp, Homo sapiens
  source 1..23: mol_type = genomic DNA
atggtgatgcttctggtgatggt

SEQ ID NO: 4045 - DNA, 23 bp, Homo sapiens
  source 1..23: mol_type = genomic DNA
tggtgatgcttctggtgatggtg

SEQ ID NO: 4046 - DNA, 23 bp, Homo sapiens
  source 1..23: mol_type = genomic DNA
ggtgatgcttctggtgatggtgg

SEQ ID NO: 4047 - DNA, 23 bp, Homo sapiens
  source 1..23: mol_type = genomic DNA
gtgatgcttctggtgatggtggt

SEQ ID NO: 4048 - DNA, 23 bp, Homo sapiens
  source 1..23: mol_type = genomic DNA
tgatgcttctggtgatggtggtc

SEQ ID NO: 4049 - DNA, 23 bp, Homo sapiens
  source 1..23: mol_type = genomic DNA
gatgcttctggtgatggtggtca

SEQ ID NO: 4050 - DNA, 23 bp, Homo sapiens
  source 1..23: mol_type = genomic DNA
atgcttctggtgatggtggtcat

SEQ ID NO: 4051 - DNA, 23 bp, Homo sapiens
  source 1..23: mol_type = genomic DNA
tgcttctggtgatggtggtcatg

SEQ ID NO: 4052 - DNA, 23 bp, Homo sapiens
  source 1..23: mol_type = genomic DNA
gcttctggtgatggtggtcatga

SEQ ID NO: 4053 - DNA, 23 bp, Homo sapiens
  source 1..23: mol_type = genomic DNA
cttctggtgatggtggtcatgat

SEQ ID NO: 4054 - DNA, 23 bp, Homo sapiens
  source 1..23: mol_type = genomic DNA
ttctggtgatggtggtcatgatg

SEQ ID NO: 4055 - DNA, 23 bp, Homo sapiens
  source 1..23: mol_type = genomic DNA
tctggtgatggtggtcatgatgg

SEQ ID NO: 4056 - DNA, 23 bp, Homo sapiens
  source 1..23: mol_type = genomic DNA
ctggtgatggtggtcatgatggt

SEQ ID NO: 4057 - DNA, 23 bp, Homo sapiens
  source 1..23: mol_type = genomic DNA
tggtgatggtggtcatgatggtg

SEQ ID NO: 4058 - DNA, 23 bp, Homo sapiens
  source 1..23: mol_type = genomic DNA
ggtgatggtggtcatgatggtgg

SEQ ID NO: 4059 - DNA, 23 bp, Homo sapiens
  source 1..23: mol_type = genomic DNA
gtgatggtggtcatgatggtggt

SEQ ID NO: 4060 - DNA, 23 bp, Homo sapiens
  source 1..23: mol_type = genomic DNA
tgatggtggtcatgatggtggtg

SEQ ID NO: 4061 - DNA, 23 bp, Homo sapiens
  source 1..23: mol_type = genomic DNA
gatggtggtcatgatggtggtgc

SEQ ID NO: 4062 - DNA, 23 bp, Homo sapiens
  source 1..23: mol_type = genomic DNA
atggtggtcatgatggtggtgcc

SEQ ID NO: 4063 - DNA, 23 bp, Homo sapiens
  source 1..23: mol_type = genomic DNA
tggtggtcatgatggtggtgccg

SEQ ID NO: 4064 - DNA, 23 bp, Homo sapiens
  source 1..23: mol_type = genomic DNA
ggtggtcatgatggtggtgccgt

SEQ ID NO: 4065 - DNA, 23 bp, Homo sapiens
  source 1..23: mol_type = genomic DNA
gtggtcatgatggtggtgccgtc

SEQ ID NO: 4066 - DNA, 23 bp, Homo sapiens
  source 1..23: mol_type = genomic DNA
tggtcatgatggtggtgccgtct

SEQ ID NO: 4067 - DNA, 23 bp, Homo sapiens
  source 1..23: mol_type = genomic DNA
ggtcatgatggtggtgccgtctg

SEQ ID NO: 4068 - DNA, 23 bp, Homo sapiens
  source 1..23: mol_type = genomic DNA
gtcatgatggtggtgccgtctgc

SEQ ID NO: 4069 - DNA, 23 bp, Homo sapiens
  source 1..23: mol_type = genomic DNA
tcatgatggtggtgccgtctgcc

SEQ ID NO: 4070 - DNA, 23 bp, Homo sapiens
  source 1..23: mol_type = genomic DNA
catgatggtggtgccgtctgcct

SEQ ID NO: 4071 - DNA, 23 bp, Homo sapiens
  source 1..23: mol_type = genomic DNA
atgatggtggtgccgtctgcctc

SEQ ID NO: 4072 - DNA, 23 bp, Homo sapiens
  source 1..23: mol_type = genomic DNA
tgatggtggtgccgtctgcctct

SEQ ID NO: 4073 - DNA, 23 bp, Homo sapiens
  source 1..23: mol_type = genomic DNA
gatggtggtgccgtctgcctctc

SEQ ID NO: 4074 - DNA, 23 bp, Homo sapiens
  source 1..23: mol_type = genomic DNA
atggtggtgccgtctgcctctca

SEQ ID NO: 4075 - DNA, 23 bp, Homo sapiens
  source 1..23: mol_type = genomic DNA
tggtggtgccgtctgcctctcag

SEQ ID NO: 4076 - DNA, 23 bp, Homo sapiens
  source 1..23: mol_type = genomic DNA
ggtggtgccgtctgcctctcagg

SEQ ID NO: 4077 - DNA, 23 bp, Homo sapiens
  source 1..23: mol_type = genomic DNA
gtggtgccgtctgcctctcagga

SEQ ID NO: 4078 - DNA, 23 bp, Homo sapiens
  source 1..23: mol_type = genomic DNA
tggtgccgtctgcctctcaggag

SEQ ID NO: 4079 - DNA, 23 bp, Homo sapiens
  source 1..23: mol_type = genomic DNA
ggtgccgtctgcctctcaggagc

SEQ ID NO: 4080 - DNA, 23 bp, Homo sapiens
  source 1..23: mol_type = genomic DNA
gtgccgtctgcctctcaggagct

SEQ ID NO: 4081 - DNA, 23 bp, Homo sapiens
  source 1..23: mol_type = genomic DNA
tgccgtctgcctctcaggagctg

SEQ ID NO: 4082 - DNA, 23 bp, Homo sapiens
  source 1..23: mol_type = genomic DNA
gccgtctgcctctcaggagctgg

SEQ ID NO: 4083 - DNA, 23 bp, Homo sapiens
  source 1..23: mol_type = genomic DNA
ccgtctgcctctcaggagctggt

SEQ ID NO: 4084 - DNA, 23 bp, Homo sapiens
  source 1..23: mol_type = genomic DNA
cgtctgcctctcaggagctggtc

SEQ ID NO: 4085 - DNA, 23 bp, Homo sapiens
  source 1..23: mol_type = genomic DNA
gtctgcctctcaggagctggtca

SEQ ID NO: 4086 - DNA, 23 bp, Homo sapiens
  source 1..23: mol_type = genomic DNA
tctgcctctcaggagctggtcac

SEQ ID NO: 4087 - DNA, 23 bp, Homo sapiens
  source 1..23: mol_type = genomic DNA
ctgcctctcaggagctggtcact

SEQ ID NO: 4088 - DNA, 23 bp, Homo sapiens
  source 1..23: mol_type = genomic DNA
tgcctctcaggagctggtcactg

SEQ ID NO: 4089 - DNA, 23 bp, Homo sapiens
  source 1..23: mol_type = genomic DNA
gcctctcaggagctggtcactgc

SEQ ID NO: 4090 - DNA, 23 bp, Homo sapiens
  source 1..23: mol_type = genomic DNA
cctctcaggagctggtcactgcc

SEQ ID NO: 4091 - DNA, 23 bp, Homo sapiens
  source 1..23: mol_type = genomic DNA
ctctcaggagctggtcactgcct

SEQ ID NO: 4092 - DNA, 23 bp, Homo sapiens
  source 1..23: mol_type = genomic DNA
tctcaggagctggtcactgcctg

SEQ ID NO: 4093 - DNA, 23 bp, Homo sapiens
  source 1..23: mol_type = genomic DNA
ctcaggagctggtcactgcctgg

SEQ ID NO: 4094 - DNA, 23 bp, Homo sapiens
  source 1..23: mol_type = genomic DNA
tcaggagctggtcactgcctggt

SEQ ID NO: 4095 - DNA, 23 bp, Homo sapiens
  source 1..23: mol_type = genomic DNA
caggagctggtcactgcctggta

SEQ ID NO: 4096 - DNA, 23 bp, Homo sapiens
  source 1..23: mol_type = genomic DNA
aggagctggtcactgcctggtac

SEQ ID NO: 4097 - DNA, 23 bp, Homo sapiens
  source 1..23: mol_type = genomic DNA
ggagctggtcactgcctggtaca

SEQ ID NO: 4098 - DNA, 23 bp, Homo sapiens
  source 1..23: mol_type = genomic DNA
gagctggtcactgcctggtacat

SEQ ID NO: 4099 - DNA, 23 bp, Homo sapiens
  source 1..23: mol_type = genomic DNA
agctggtcactgcctggtacatc

SEQ ID NO: 4100 - DNA, 23 bp, Homo sapiens
  source 1..23: mol_type = genomic DNA
gctggtcactgcctggtacatcg

SEQ ID NO: 4101 - DNA, 23 bp, Homo sapiens
  source 1..23: mol_type = genomic DNA
ctggtcactgcctggtacatcgg

SEQ ID NO: 4102 - DNA, 23 bp, Homo sapiens
  source 1..23: mol_type = genomic DNA
tggtcactgcctggtacatcggc

SEQ ID NO: 4103 - DNA, 23 bp, Homo sapiens
  source 1..23: mol_type = genomic DNA
ggtcactgcctggtacatcggct

SEQ ID NO: 4104 - DNA, 23 bp, Homo sapiens
  source 1..23: mol_type = genomic DNA
gtcactgcctggtacatcggctt

SEQ ID NO: 4105 - DNA, 23 bp, Homo sapiens
  source 1..23: mol_type = genomic DNA
tcactgcctggtacatcggcttc

SEQ ID NO: 4106 - DNA, 23 bp, Homo sapiens
  source 1..23: mol_type = genomic DNA
cactgcctggtacatcggcttcc

SEQ ID NO: 4107 - DNA, 23 bp, Homo sapiens
  source 1..23: mol_type = genomic DNA
actgcctggtacatcggcttcct

SEQ ID NO: 4108 - DNA, 23 bp, Homo sapiens
  source 1..23: mol_type = genomic DNA
ctgcctggtacatcggcttcctt

SEQ ID NO: 4109 - DNA, 23 bp, Homo sapiens
  source 1..23: mol_type = genomic DNA
tgcctggtacatcggcttccttt

SEQ ID NO: 4110 - DNA, 23 bp, Homo sapiens
  source 1..23: mol_type = genomic DNA
gcctggtacatcggcttcctttg

SEQ ID NO: 4111 - DNA, 23 bp, Homo sapiens
  source 1..23: mol_type = genomic DNA
cctggtacatcggcttcctttgt

SEQ ID NO: 4112 - DNA, 23 bp, Homo sapiens
  source 1..23: mol_type = genomic DNA
ctggtacatcggcttcctttgtc

SEQ ID NO: 4113 - DNA, 23 bp, Homo sapiens
  source 1..23: mol_type = genomic DNA
tggtacatcggcttcctttgtct

SEQ ID NO: 4114 - DNA, 23 bp, Homo sapiens
  source 1..23: mol_type = genomic DNA
ggtacatcggcttcctttgtctc

SEQ ID NO: 4115 - DNA, 23 bp, Homo sapiens
  source 1..23: mol_type = genomic DNA
gtacatcggcttcctttgtctca

SEQ ID NO: 4116 - DNA, 23 bp, Homo sapiens
  source 1..23: mol_type = genomic DNA
tacatcggcttcctttgtctcat

SEQ ID NO: 4117 - DNA, 23 bp, Homo sapiens
  source 1..23: mol_type = genomic DNA
acatcggcttcctttgtctcatc

SEQ ID NO: 4118 - DNA, 23 bp, Homo sapiens
  source 1..23: mol_type = genomic DNA
catcggcttcctttgtctcatcc

SEQ ID NO: 4119 - DNA, 23 bp, Homo sapiens
  source 1..23: mol_type = genomic DNA
atcggcttcctttgtctcatcct

SEQ ID NO: 4120 - DNA, 23 bp, Homo sapiens
  source 1..23: mol_type = genomic DNA
tcggcttcctttgtctcatcctg

SEQ ID NO: 4121 - DNA, 23 bp, Homo sapiens
  source 1..23: mol_type = genomic DNA
cggcttcctttgtctcatcctgg

SEQ ID NO: 4122 - DNA, 23 bp, Homo sapiens
  source 1..23: mol_type = genomic DNA
ggcttcctttgtctcatcctggc

SEQ ID NO: 4123 - DNA, 23 bp, Homo sapiens
  source 1..23: mol_type = genomic DNA
gcttcctttgtctcatcctggcc

SEQ ID NO: 4124 - DNA, 23 bp, Homo sapiens
  source 1..23: mol_type = genomic DNA
cttcctttgtctcatcctggcct

SEQ ID NO: 4125 - DNA, 23 bp, Homo sapiens
  source 1..23: mol_type = genomic DNA
ttcctttgtctcatcctggcctc

SEQ ID NO: 4126 - DNA, 23 bp, Homo sapiens
  source 1..23: mol_type = genomic DNA
tcctttgtctcatcctggcctcg

SEQ ID NO: 4127 - DNA, 23 bp, Homo sapiens
  source 1..23: mol_type = genomic DNA
cctttgtctcatcctggcctcgt

SEQ ID NO: 4128 - DNA, 23 bp, Homo sapiens
  source 1..23: mol_type = genomic DNA
ctttgtctcatcctggcctcgtt

SEQ ID NO: 4129 - DNA, 23 bp, Homo sapiens
  source 1..23: mol_type = genomic DNA
tttgtctcatcctggcctcgttc

SEQ ID NO: 4130 - DNA, 23 bp, Homo sapiens
  source 1..23: mol_type = genomic DNA
ttgtctcatcctggcctcgttcc

SEQ ID NO: 4131 - DNA, 23 bp, Homo sapiens
  source 1..23: mol_type = genomic DNA
tgtctcatcctggcctcgttcct

SEQ ID NO: 4132 - DNA, 23 bp, Homo sapiens
  source 1..23: mol_type = genomic DNA
gtctcatcctggcctcgttcctg

SEQ ID NO: 4133 - DNA, 23 bp, Homo sapiens
  source 1..23: mol_type = genomic DNA
tctcatcctggcctcgttcctgg

SEQ ID NO: 4134 - DNA, 23 bp, Homo sapiens
  source 1..23: mol_type = genomic DNA
ctcatcctggcctcgttcctggt

SEQ ID NO: 4135 - DNA, 23 bp, Homo sapiens
  source 1..23: mol_type = genomic DNA
tcatcctggcctcgttcctggtg

SEQ ID NO: 4136 - DNA, 23 bp, Homo sapiens
  source 1..23: mol_type = genomic DNA
catcctggcctcgttcctggtgt

SEQ ID NO: 4137 - DNA, 23 bp, Homo sapiens
  source 1..23: mol_type = genomic DNA
atcctggcctcgttcctggtgta

SEQ ID NO: 4138 - DNA, 23 bp, Homo sapiens
  source 1..23: mol_type = genomic DNA
tcctggcctcgttcctggtgtac

SEQ ID NO: 4139 - DNA, 23 bp, Homo sapiens
  source 1..23: mol_type = genomic DNA
cctggcctcgttcctggtgtact

SEQ ID NO: 4140 - DNA, 23 bp, Homo sapiens
  source 1..23: mol_type = genomic DNA
ctggcctcgttcctggtgtactt

SEQ ID NO: 4141 - DNA, 23 bp, Homo sapiens
  source 1..23: mol_type = genomic DNA
tggcctcgttcctggtgtacttg

SEQ ID NO: 4142 - DNA, 23 bp, Homo sapiens
  source 1..23: mol_type = genomic DNA
ggcctcgttcctggtgtacttgg

SEQ ID NO: 4143 - DNA, 23 bp, Homo sapiens
  source 1..23: mol_type = genomic DNA
gcctcgttcctggtgtacttggc

SEQ ID NO: 4144 - DNA, 23 bp, Homo sapiens
  source 1..23: mol_type = genomic DNA
cctcgttcctggtgtacttggca

SEQ ID NO: 4145 - DNA, 23 bp, Homo sapiens
  source 1..23: mol_type = genomic DNA
ctcgttcctggtgtacttggcag

SEQ ID NO: 4146 - DNA, 23 bp, Homo sapiens
  source 1..23: mol_type = genomic DNA
tcgttcctggtgtacttggcaga

SEQ ID NO: 4147 - DNA, 23 bp, Homo sapiens
  source 1..23: mol_type = genomic DNA
cgttcctggtgtacttggcagag

SEQ ID NO: 4148 - DNA, 23 bp, Homo sapiens
  source 1..23: mol_type = genomic DNA
gttcctggtgtacttggcagaga

SEQ ID NO: 4149 - DNA, 23 bp, Homo sapiens
  source 1..23: mol_type = genomic DNA
ttcctggtgtacttggcagagaa

SEQ ID NO: 4150 - DNA, 23 bp, Homo sapiens
  source 1..23: mol_type = genomic DNA
tcctggtgtacttggcagagaag

SEQ ID NO: 4151 - DNA, 23 bp, Homo sapiens
  source 1..23: mol_type = genomic DNA
cctggtgtacttggcagagaagg

SEQ ID NO: 4152 - DNA, 23 bp, Homo sapiens
  source 1..23: mol_type = genomic DNA
ctggtgtacttggcagagaaggg

SEQ ID NO: 4153 - DNA, 23 bp, Homo sapiens
  source 1..23: mol_type = genomic DNA
tggtgtacttggcagagaagggg

SEQ ID NO: 4154 - DNA, 23 bp, Homo sapiens
  source 1..23: mol_type = genomic DNA
ggtgtacttggcagagaaggggg

SEQ ID NO: 4155 - DNA, 23 bp, Homo sapiens
  source 1..23: mol_type = genomic DNA
gtgtacttggcagagaaggggga

SEQ ID NO: 4156 - DNA, 23 bp, Homo sapiens
  source 1..23: mol_type = genomic DNA
tgtacttggcagagaagggggag

SEQ ID NO: 4157 - DNA, 23 bp, Homo sapiens
  source 1..23: mol_type = genomic DNA
gtacttggcagagaagggggaga

SEQ ID NO: 4158 - DNA, 23 bp, Homo sapiens
  source 1..23: mol_type = genomic DNA
tacttggcagagaagggggagaa

SEQ ID NO: 4159 - DNA, 23 bp, Homo sapiens
  source 1..23: mol_type = genomic DNA
acttggcagagaagggggagaac

SEQ ID NO: 4160 - DNA, 23 bp, Homo sapiens
  source 1..23: mol_type = genomic DNA
cttggcagagaagggggagaacg

SEQ ID NO: 4161 - DNA, 23 bp, Homo sapiens
  source 1..23: mol_type = genomic DNA
ttggcagagaagggggagaacga

SEQ ID NO: 4162 - DNA, 23 bp, Homo sapiens
  source 1..23: mol_type = genomic DNA
tggcagagaagggggagaacgac

SEQ ID NO: 4163 - DNA, 23 bp, Homo sapiens
  source 1..23: mol_type = genomic DNA
ggcagagaagggggagaacgacc

SEQ ID NO: 4164 - DNA, 23 bp, Homo sapiens
  source 1..23: mol_type = genomic DNA
gcagagaagggggagaacgacca

SEQ ID NO: 4165 - DNA, 23 bp, Homo sapiens
  source 1..23: mol_type = genomic DNA
cagagaagggggagaacgaccac

SEQ ID NO: 4166 - DNA, 23 bp, Homo sapiens
  source 1..23: mol_type = genomic DNA
agagaagggggagaacgaccact

SEQ ID NO: 4167 - DNA, 23 bp, Homo sapiens
  source 1..23: mol_type = genomic DNA
gagaagggggagaacgaccactt

SEQ ID NO: 4168 - DNA, 23 bp, Homo sapiens
  source 1..23: mol_type = genomic DNA
agaagggggagaacgaccacttt

SEQ ID NO: 4169 - DNA, 23 bp, Homo sapiens
  source 1..23: mol_type = genomic DNA
gaagggggagaacgaccactttg

SEQ ID NO: 4170 - DNA, 23 bp, Homo sapiens
  source 1..23: mol_type = genomic DNA
aagggggagaacgaccactttga

SEQ ID NO: 4171 - DNA, 23 bp, Homo sapiens
  source 1..23: mol_type = genomic DNA
agggggagaacgaccactttgac

SEQ ID NO: 4172 - DNA, 23 bp, Homo sapiens
  source 1..23: mol_type = genomic DNA
gggggagaacgaccactttgaca

SEQ ID NO: 4173 - DNA, 23 bp, Homo sapiens
  source 1..23: mol_type = genomic DNA
ggggagaacgaccactttgacac

SEQ ID NO: 4174 - DNA, 23 bp, Homo sapiens
  source 1..23: mol_type = genomic DNA
gggagaacgaccactttgacacc

SEQ ID NO: 4175 - DNA, 23 bp, Homo sapiens
  source 1..23: mol_type = genomic DNA
ggagaacgaccactttgacacct

SEQ ID NO: 4176 - DNA, 23 bp, Homo sapiens
  source 1..23: mol_type = genomic DNA
gagaacgaccactttgacaccta

SEQ ID NO: 4177 - DNA, 23 bp, Homo sapiens
  source 1..23: mol_type = genomic DNA
agaacgaccactttgacacctac

SEQ ID NO: 4178 - DNA, 23 bp, Homo sapiens
  source 1..23: mol_type = genomic DNA
gaacgaccactttgacacctacg

SEQ ID NO: 4179 - DNA, 23 bp, Homo sapiens
  source 1..23: mol_type = genomic DNA
aacgaccactttgacacctacgc

SEQ ID NO: 4180 - DNA, 23 bp, Homo sapiens
  source 1..23: mol_type = genomic DNA
acgaccactttgacacctacgcg

SEQ ID NO: 4181 - DNA, 23 bp, Homo sapiens
  source 1..23: mol_type = genomic DNA
cgaccactttgacacctacgcgg

SEQ ID NO: 4182 - DNA, 23 bp, Homo sapiens
  source 1..23: mol_type = genomic DNA
gaccactttgacacctacgcgga

SEQ ID NO: 4183 - DNA, 23 bp, Homo sapiens
  source 1..23: mol_type = genomic DNA
accactttgacacctacgcggat

SEQ ID NO: 4184 - DNA, 23 bp, Homo sapiens
  source 1..23: mol_type = genomic DNA
ccactttgacacctacgcggatg

SEQ ID NO: 4185 - DNA, 23 bp, Homo sapiens
  source 1..23: mol_type = genomic DNA
cactttgacacctacgcggatgc

SEQ ID NO: 4186 - DNA, 23 bp, Homo sapiens
  source 1..23: mol_type = genomic DNA
actttgacacctacgcggatgca

SEQ ID NO: 4187 - DNA, 23 bp, Homo sapiens
  source 1..23: mol_type = genomic DNA
ctttgacacctacgcggatgcac

SEQ ID NO: 4188 - DNA, 23 bp, Homo sapiens
  source 1..23: mol_type = genomic DNA
tttgacacctacgcggatgcact

SEQ ID NO: 4189 - DNA, 23 bp, Homo sapiens
  source 1..23: mol_type = genomic DNA
ttgacacctacgcggatgcactc

SEQ ID NO: 4190 - DNA, 23 bp, Homo sapiens
  source 1..23: mol_type = genomic DNA
tgacacctacgcggatgcactct

SEQ ID NO: 4191 - DNA, 23 bp, Homo sapiens
  source 1..23: mol_type = genomic DNA
gacacctacgcggatgcactctg

SEQ ID NO: 4192 - DNA, 23 bp, Homo sapiens
  source 1..23: mol_type = genomic DNA
acacctacgcggatgcactctgg

SEQ ID NO: 4193 - DNA, 23 bp, Homo sapiens
  source 1..23: mol_type = genomic DNA
cacctacgcggatgcactctggt

SEQ ID NO: 4194 - DNA, 23 bp, Homo sapiens
  source 1..23: mol_type = genomic DNA
acctacgcggatgcactctggtg

SEQ ID NO: 4195 - DNA, 23 bp, Homo sapiens
  source 1..23: mol_type = genomic DNA
cctacgcggatgcactctggtgg

SEQ ID NO: 4196 - DNA, 23 bp, Homo sapiens
  source 1..23: mol_type = genomic DNA
ctacgcggatgcactctggtggg

SEQ ID NO: 4197 - DNA, 23 bp, Homo sapiens
  source 1..23: mol_type = genomic DNA
tacgcggatgcactctggtgggg

SEQ ID NO: 4198 - DNA, 23 bp, Homo sapiens
  source 1..23: mol_type = genomic DNA
acgcggatgcactctggtggggc

SEQ ID NO: 4199 - DNA, 23 bp, Homo sapiens
  source 1..23: mol_type = genomic DNA
cgcggatgcactctggtggggcc

SEQ ID NO: 4200 - DNA, 23 bp, Homo sapiens
  source 1..23: mol_type = genomic DNA
gcggatgcactctggtggggcct

SEQ ID NO: 4201 - DNA, 23 bp, Homo sapiens
  source 1..23: mol_type = genomic DNA
cggatgcactctggtggggcctg

SEQ ID NO: 4202 - DNA, 23 bp, Homo sapiens
  source 1..23: mol_type = genomic DNA
ggatgcactctggtggggcctgg

SEQ ID NO: 4203 - DNA, 23 bp, Homo sapiens
  source 1..23: mol_type = genomic DNA
gatgcactctggtggggcctggt

SEQ ID NO: 4204 - DNA, 23 bp, Homo sapiens
  source 1..23: mol_type = genomic DNA
atgcactctggtggggcctggtg

SEQ ID NO: 4205 - DNA, 23 bp, Homo sapiens
  source 1..23: mol_type = genomic DNA
tgcactctggtggggcctggtga

SEQ ID NO: 4206 - DNA, 23 bp, Homo sapiens
  source 1..23: mol_type = genomic DNA
gcactctggtggggcctggtgag

SEQ ID NO: 4207 - DNA, 23 bp, Homo sapiens
  source 1..23: mol_type = genomic DNA
cactctggtggggcctggtgagt

SEQ ID NO: 4208 - DNA, 23 bp, Homo sapiens
  source 1..23: mol_type = genomic DNA
actctggtggggcctggtgagtt

SEQ ID NO: 4209 - DNA, 23 bp, Homo sapiens
  source 1..23: mol_type = genomic DNA
ctctggtggggcctggtgagttg

SEQ ID NO: 4210 - DNA, 23 bp, Homo sapiens
  source 1..23: mol_type = genomic DNA
tctggtggggcctggtgagttgt

SEQ ID NO: 4211 - DNA, 23 bp, Homo sapiens
  source 1..23: mol_type = genomic DNA
ctggtggggcctggtgagttgtg

SEQ ID NO: 4212 - DNA, 23 bp, Homo sapiens
  source 1..23: mol_type = genomic DNA
tggtggggcctggtgagttgtgg

SEQ ID NO: 4213 - DNA, 23 bp, Homo sapiens
  source 1..23: mol_type = genomic DNA
ggtggggcctggtgagttgtggt

SEQ ID NO: 4214 - DNA, 23 bp, Homo sapiens
  source 1..23: mol_type = genomic DNA
gtggggcctggtgagttgtggtc

SEQ ID NO: 4215 - DNA, 23 bp, Homo sapiens
  source 1..23: mol_type = genomic DNA
tggggcctggtgagttgtggtca

SEQ ID NO: 4216 - DNA, 23 bp, Homo sapiens
  source 1..23: mol_type = genomic DNA
ggggcctggtgagttgtggtcat

SEQ ID NO: 4217 - DNA, 23 bp, Homo sapiens
  source 1..23: mol_type = genomic DNA
gggcctggtgagttgtggtcatt

SEQ ID NO: 4218 - DNA, 23 bp, Homo sapiens
  source 1..23: mol_type = genomic DNA
ggcctggtgagttgtggtcattg

SEQ ID NO: 4219 - DNA, 23 bp, Homo sapiens
  source 1..23: mol_type = genomic DNA
gcctggtgagttgtggtcattgt

SEQ ID NO: 4220 - DNA, 23 bp, Homo sapiens
  source 1..23: mol_type = genomic DNA
cctggtgagttgtggtcattgtg

SEQ ID NO: 4221 - DNA, 23 bp, Homo sapiens
  source 1..23: mol_type = genomic DNA
ctggtgagttgtggtcattgtgg

SEQ ID NO: 4222 - DNA, 23 bp, Homo sapiens
  source 1..23: mol_type = genomic DNA
tggtgagttgtggtcattgtggt

SEQ ID NO: 4223 - DNA, 23 bp, Homo sapiens
  source 1..23: mol_type = genomic DNA
ggtgagttgtggtcattgtggtt

SEQ ID NO: 4224 - DNA, 23 bp, Homo sapiens
  source 1..23: mol_type = genomic DNA
gtgagttgtggtcattgtggttt

SEQ ID NO: 4225 - DNA, 23 bp, Homo sapiens
  source 1..23: mol_type = genomic DNA
tgagttgtggtcattgtggtttt

SEQ ID NO: 4226 - DNA, 23 bp, Homo sapiens
  source 1..23: mol_type = genomic DNA
gagttgtggtcattgtggttttc

SEQ ID NO: 4227 - DNA, 23 bp, Homo sapiens
  source 1..23: mol_type = genomic DNA
agttgtggtcattgtggttttcc

SEQ ID NO: 4228 - DNA, 23 bp, Homo sapiens
  source 1..23: mol_type = genomic DNA
gttgtggtcattgtggttttccc

SEQ ID NO: 4229 - DNA, 23 bp, Homo sapiens
  source 1..23: mol_type = genomic DNA
ttgtggtcattgtggttttccct

SEQ ID NO: 4230 - DNA, 23 bp, Homo sapiens
  source 1..23: mol_type = genomic DNA
tgtggtcattgtggttttccctt

SEQ ID NO: 4231 - DNA, 23 bp, Homo sapiens
  source 1..23: mol_type = genomic DNA
gtggtcattgtggttttcccttt

SEQ ID NO: 4232 - DNA, 23 bp, Homo sapiens
  source 1..23: mol_type = genomic DNA
tggtcattgtggttttccctttc

SEQ ID NO: 4233 - DNA, 23 bp, Homo sapiens
  source 1..23: mol_type = genomic DNA
ggtcattgtggttttccctttcc

SEQ ID NO: 4234 - DNA, 23 bp, Homo sapiens
  source 1..23: mol_type = genomic DNA
gtcattgtggttttccctttccc

SEQ ID NO: 4235 - DNA, 23 bp, Homo sapiens
  source 1..23: mol_type = genomic DNA
tcattgtggttttccctttccct

SEQ ID NO: 4236 - DNA, 23 bp, Homo sapiens
  source 1..23: mol_type = genomic DNA
cattgtggttttccctttccctg

SEQ ID NO: 4237 - DNA, 23 bp, Homo sapiens
  source 1..23: mol_type = genomic DNA
attgtggttttccctttccctgc

SEQ ID NO: 4238 - DNA, 23 bp, Homo sapiens
  source 1..23: mol_type = genomic DNA
ttgtggttttccctttccctgct

SEQ ID NO: 4239 - DNA, 23 bp, Homo sapiens
  source 1..23: mol_type = genomic DNA
tgtggttttccctttccctgctg

SEQ ID NO: 4240 - DNA, 23 bp, Homo sapiens
  source 1..23: mol_type = genomic DNA
gtggttttccctttccctgctga

SEQ ID NO: 4241 - DNA, 23 bp, Homo sapiens
  source 1..23: mol_type = genomic DNA
tggttttccctttccctgctgat

SEQ ID NO: 4242 - DNA, 23 bp, Homo sapiens
  source 1..23: mol_type = genomic DNA
ggttttccctttccctgctgata

SEQ ID NO: 4243 - DNA, 23 bp, Homo sapiens
  source 1..23: mol_type = genomic DNA
gttttccctttccctgctgatac

SEQ ID NO: 4244 - DNA, 23 bp, Homo sapiens
  source 1..23: mol_type = genomic DNA
ttttccctttccctgctgataca

SEQ ID NO: 4245 - DNA, 23 bp, Homo sapiens
  source 1..23: mol_type = genomic DNA
tttccctttccctgctgatacac

SEQ ID NO: 4246 - DNA, 23 bp, Homo sapiens
  source 1..23: mol_type = genomic DNA
ttccctttccctgctgatacacc

SEQ ID NO: 4247 - DNA, 23 bp, Homo sapiens
  source 1..23: mol_type = genomic DNA
tccctttccctgctgatacaccc

SEQ ID NO: 4248 - DNA, 23 bp, Homo sapiens
  source 1..23: mol_type = genomic DNA
ccctttccctgctgatacacccc

SEQ ID NO: 4249 - DNA, 23 bp, Homo sapiens
  source 1..23: mol_type = genomic DNA
cctttccctgctgatacacccct

SEQ ID NO: 4250 - DNA, 23 bp, Homo sapiens
  source 1..23: mol_type = genomic DNA
ctttccctgctgatacacccctg

SEQ ID NO: 4251 - DNA, 23 bp, Homo sapiens
  source 1..23: mol_type = genomic DNA
tttccctgctgatacacccctgt

SEQ ID NO: 4252 - DNA, 23 bp, Homo sapiens
  source 1..23: mol_type = genomic DNA
ttccctgctgatacacccctgtc

SEQ ID NO: 4253 - DNA, 23 bp, Homo sapiens
  source 1..23: mol_type = genomic DNA
tccctgctgatacacccctgtcc

SEQ ID NO: 4254 - DNA, 23 bp, Homo sapiens
  source 1..23: mol_type = genomic DNA
ccctgctgatacacccctgtccc

SEQ ID NO: 4255 - DNA, 23 bp, Homo sapiens
  source 1..23: mol_type = genomic DNA
cctgctgatacacccctgtccct

SEQ ID NO: 4256 - DNA, 23 bp, Homo sapiens
  source 1..23: mol_type = genomic DNA
ctgctgatacacccctgtccctg

SEQ ID NO: 4257 - DNA, 23 bp, Homo sapiens
  source 1..23: mol_type = genomic DNA
tgctgatacacccctgtccctgt

SEQ ID NO: 4258 - DNA, 23 bp, Homo sapiens
  source 1..23: mol_type = genomic DNA
gctgatacacccctgtccctgtg

SEQ ID NO: 4259 - DNA, 23 bp, Homo sapiens
  source 1..23: mol_type = genomic DNA
ctgatacacccctgtccctgtgc

SEQ ID NO: 4260 - DNA, 23 bp, Homo sapiens
  source 1..23: mol_type = genomic DNA
tgatacacccctgtccctgtgct

SEQ ID NO: 4261 - DNA, 23 bp, Homo sapiens
  source 1..23: mol_type = genomic DNA
gatacacccctgtccctgtgctg

SEQ ID NO: 4262 - DNA, 23 bp, Homo sapiens
  source 1..23: mol_type = genomic DNA
atacacccctgtccctgtgctgg

SEQ ID NO: 4263 - DNA, 23 bp, Homo sapiens
  source 1..23: mol_type = genomic DNA
tacacccctgtccctgtgctggg

SEQ ID NO: 4264 - DNA, 23 bp, Homo sapiens
  source 1..23: mol_type = genomic DNA
acacccctgtccctgtgctggga

SEQ ID NO: 4265 - DNA, 23 bp, Homo sapiens
  source 1..23: mol_type = genomic DNA
cacccctgtccctgtgctgggac

SEQ ID NO: 4266 - DNA, 23 bp, Homo sapiens
  source 1..23: mol_type = genomic DNA
acccctgtccctgtgctgggacc

SEQ ID NO: 4267 - DNA, 23 bp, Homo sapiens
  source 1..23: mol_type = genomic DNA
cccctgtccctgtgctgggacca

SEQ ID NO: 4268 - DNA, 23 bp, Homo sapiens
  source 1..23: mol_type = genomic DNA
ccctgtccctgtgctgggaccag

SEQ ID NO: 4269 - DNA, 23 bp, Homo sapiens
  source 1..23: mol_type = genomic DNA
cctgtccctgtgctgggaccagg

SEQ ID NO: 4270 - DNA, 23 bp, Homo sapiens
  source 1..23: mol_type = genomic DNA
ctgtccctgtgctgggaccaggc

SEQ ID NO: 4271 - DNA, 23 bp, Homo sapiens
  source 1..23: mol_type = genomic DNA
tgtccctgtgctgggaccaggct

SEQ ID NO: 4272 - DNA, 23 bp, Homo sapiens
  source 1..23: mol_type = genomic DNA
gtccctgtgctgggaccaggctc

SEQ ID NO: 4273 - DNA, 23 bp, Homo sapiens
  source 1..23: mol_type = genomic DNA
tccctgtgctgggaccaggctct

SEQ ID NO: 4274 - DNA, 23 bp, Homo sapiens
  source 1..23: mol_type = genomic DNA
ccctgtgctgggaccaggctctc

SEQ ID NO: 4275 - DNA, 23 bp, Homo sapiens
  source 1..23: mol_type = genomic DNA
cctgtgctgggaccaggctctca

SEQ ID NO: 4276 - DNA, 23 bp, Homo sapiens
  source 1..23: mol_type = genomic DNA
ctgtgctgggaccaggctctcac

SEQ ID NO: 4277 - DNA, 23 bp, Homo sapiens
  source 1..23: mol_type = genomic DNA
tgtgctgggaccaggctctcact

SEQ ID NO: 4278 - DNA, 23 bp, Homo sapiens
  source 1..23: mol_type = genomic DNA
gtgctgggaccaggctctcactg

SEQ ID NO: 4279 - DNA, 23 bp, Homo sapiens
  source 1..23: mol_type = genomic DNA
tgctgggaccaggctctcactgg

SEQ ID NO: 4280 - DNA, 23 bp, Homo sapiens
  source 1..23: mol_type = genomic DNA
gctgggaccaggctctcactggc

SEQ ID NO: 4281 - DNA, 23 bp, Homo sapiens
  source 1..23: mol_type = genomic DNA
ctgggaccaggctctcactggct

SEQ ID NO: 4282 - DNA, 23 bp, Homo sapiens
  source 1..23: mol_type = genomic DNA
tgggaccaggctctcactggctg

SEQ ID NO: 4283 - DNA, 23 bp, Homo sapiens
  source 1..23: mol_type = genomic DNA
gggaccaggctctcactggctga

SEQ ID NO: 4284 - DNA, 23 bp, Homo sapiens
  source 1..23: mol_type = genomic DNA
ggaccaggctctcactggctgag

SEQ ID NO: 4285 - DNA, 23 bp, Homo sapiens
  source 1..23: mol_type = genomic DNA
gaccaggctctcactggctgagc

SEQ ID NO: 4286 - DNA, 23 bp, Homo sapiens
  source 1..23: mol_type = genomic DNA
accaggctctcactggctgagcc

SEQ ID NO: 4287 - DNA, 23 bp, Homo sapiens
  source 1..23: mol_type = genomic DNA
ccaggctctcactggctgagcct

SEQ ID NO: 4288 - DNA, 23 bp, Homo sapiens
  source 1..23: mol_type = genomic DNA
caggctctcactggctgagcctg

SEQ ID NO: 4289 - DNA, 23 bp, Homo sapiens
  source 1..23: mol_type = genomic DNA
aggctctcactggctgagcctgc

SEQ ID NO: 4290 - DNA, 23 bp, Homo sapiens
  source 1..23: mol_type = genomic DNA
ggctctcactggctgagcctgct

SEQ ID NO: 4291 - DNA, 23 bp, Homo sapiens
  source 1..23: mol_type = genomic DNA
gctctcactggctgagcctgctc

SEQ ID NO: 4292 - DNA, 23 bp, Homo sapiens
  source 1..23: mol_type = genomic DNA
ctctcactggctgagcctgctcc

SEQ ID NO: 4293 - DNA, 23 bp, Homo sapiens
  source 1..23: mol_type = genomic DNA
tctcactggctgagcctgctcca

SEQ ID NO: 4294 - DNA, 23 bp, Homo sapiens
  source 1..23: mol_type = genomic DNA
ctcactggctgagcctgctccat

SEQ ID NO: 4295 - DNA, 23 bp, Homo sapiens
  source 1..23: mol_type = genomic DNA
tcactggctgagcctgctccata

SEQ ID NO: 4296 - DNA, 23 bp, Homo sapiens
  source 1..23: mol_type = genomic DNA
cactggctgagcctgctccatac

SEQ ID NO: 4297 - DNA, 23 bp, Homo sapiens
  source 1..23: mol_type = genomic DNA
actggctgagcctgctccataca

SEQ ID NO: 4298 - DNA, 23 bp, Homo sapiens
  source 1..23: mol_type = genomic DNA
ctggctgagcctgctccatacat

SEQ ID NO: 4299 - DNA, 23 bp, Homo sapiens
  source 1..23: mol_type = genomic DNA
tggctgagcctgctccatacatc

SEQ ID NO: 4300 - DNA, 23 bp, Homo sapiens
  source 1..23: mol_type = genomic DNA
ggctgagcctgctccatacatct

SEQ ID NO: 4301 - DNA, 23 bp, Homo sapiens
  source 1..23: mol_type = genomic DNA
gctgagcctgctccatacatctc

SEQ ID NO: 4302 - DNA, 23 bp, Homo sapiens
  source 1..23: mol_type = genomic DNA
ctgagcctgctccatacatctct

SEQ ID NO: 4303 - DNA, 23 bp, Homo sapiens
  source 1..23: mol_type = genomic DNA
tgagcctgctccatacatctctt

SEQ ID NO: 4304 - DNA, 23 bp, Homo sapiens
  source 1..23: mol_type = genomic DNA
gagcctgctccatacatctcttt

SEQ ID NO: 4305 - DNA, 23 bp, Homo sapiens
  source 1..23: mol_type = genomic DNA
agcctgctccatacatctctttg

SEQ ID NO: 4306 - DNA, 23 bp, Homo sapiens
  source 1..23: mol_type = genomic DNA
gcctgctccatacatctctttgg

SEQ ID NO: 4307 - DNA, 23 bp, Homo sapiens
  source 1..23: mol_type = genomic DNA
cctgctccatacatctctttggg

SEQ ID NO: 4308 - DNA, 23 bp, Homo sapiens
  source 1..23: mol_type = genomic DNA
ctgctccatacatctctttgggg

SEQ ID NO: 4309 - DNA, 23 bp, Homo sapiens
  source 1..23: mol_type = genomic DNA
tgctccatacatctctttggggc

SEQ ID NO: 4310 - DNA, 23 bp, Homo sapiens
  source 1..23: mol_type = genomic DNA
gctccatacatctctttggggcc

SEQ ID NO: 4311 - DNA, 23 bp, Homo sapiens
  source 1..23: mol_type = genomic DNA
ctccatacatctctttggggcca

SEQ ID NO: 4312 - DNA, 23 bp, Homo sapiens
  source 1..23: mol_type = genomic DNA
tccatacatctctttggggccac

SEQ ID NO: 4313 - DNA, 23 bp, Homo sapiens
  source 1..23: mol_type = genomic DNA
ccatacatctctttggggccacc

SEQ ID NO: 4314 - DNA, 23 bp, Homo sapiens
  source 1..23: mol_type = genomic DNA
catacatctctttggggccacct

SEQ ID NO: 4315 - DNA, 23 bp, Homo sapiens
  source 1..23: mol_type = genomic DNA
atacatctctttggggccacctg

SEQ ID NO: 4316 - DNA, 23 bp, Homo sapiens
  source 1..23: mol_type = genomic DNA
tacatctctttggggccacctgc

SEQ ID NO: 4317 - DNA, 23 bp, Homo sapiens
  source 1..23: mol_type = genomic DNA
acatctctttggggccacctgct

SEQ ID NO: 4318 - DNA, 23 bp, Homo sapiens
  source 1..23: mol_type = genomic DNA
catctctttggggccacctgctg

SEQ ID NO: 4319 - DNA, 23 bp, Homo sapiens
  source 1..23: mol_type = genomic DNA
atctctttggggccacctgctgg

SEQ ID NO: 4320 - DNA, 23 bp, Homo sapiens
  source 1..23: mol_type = genomic DNA
tctctttggggccacctgctggc

SEQ ID NO: 4321 - DNA, 23 bp, Homo sapiens
  source 1..23: mol_type = genomic DNA
ctctttggggccacctgctggct

SEQ ID NO: 4322 - DNA, 23 bp, Homo sapiens
  source 1..23: mol_type = genomic DNA
tctttggggccacctgctggctg

SEQ ID NO: 4323 - DNA, 23 bp, Homo sapiens
  source 1..23: mol_type = genomic DNA
ctttggggccacctgctggctgc

SEQ ID NO: 4324 - DNA, 23 bp, Homo sapiens
  source 1..23: mol_type = genomic DNA
tttggggccacctgctggctgcc

SEQ ID NO: 4325 - DNA, 23 bp, Homo sapiens
  source 1..23: mol_type = genomic DNA
ttggggccacctgctggctgccc

SEQ ID NO: 4326 - DNA, 23 bp, Homo sapiens
  source 1..23: mol_type = genomic DNA
tggggccacctgctggctgcccg

SEQ ID NO: 4327 - DNA, 23 bp, Homo sapiens
  source 1..23: mol_type = genomic DNA
ggggccacctgctggctgcccgt

SEQ ID NO: 4328 - DNA, 23 bp, Homo sapiens
  source 1..23: mol_type = genomic DNA
gggccacctgctggctgcccgtg

SEQ ID NO: 4329 - DNA, 23 bp, Homo sapiens
  source 1..23: mol_type = genomic DNA
ggccacctgctggctgcccgtgg

SEQ ID NO: 4330 - DNA, 23 bp, Homo sapiens
  source 1..23: mol_type = genomic DNA
gccacctgctggctgcccgtggt

SEQ ID NO: 4331 - DNA, 23 bp, Homo sapiens
  source 1..23: mol_type = genomic DNA
ccacctgctggctgcccgtggtc

SEQ ID NO: 4332 - DNA, 23 bp, Homo sapiens
  source 1..23: mol_type = genomic DNA
cacctgctggctgcccgtggtca

SEQ ID NO: 4333 - DNA, 23 bp, Homo sapiens
  source 1..23: mol_type = genomic DNA
acctgctggctgcccgtggtcat

SEQ ID NO: 4334 - DNA, 23 bp, Homo sapiens
  source 1..23: mol_type = genomic DNA
cctgctggctgcccgtggtcatg

SEQ ID NO: 4335 - DNA, 23 bp, Homo sapiens
  source 1..23: mol_type = genomic DNA
ctgctggctgcccgtggtcatga

SEQ ID NO: 4336 - DNA, 23 bp, Homo sapiens
  source 1..23: mol_type = genomic DNA
tgctggctgcccgtggtcatgat

SEQ ID NO: 4337 - DNA, 23 bp, Homo sapiens
  source 1..23: mol_type = genomic DNA
gctggctgcccgtggtcatgatg

SEQ ID NO: 4338 - DNA, 23 bp, Homo sapiens
  source 1..23: mol_type = genomic DNA
ctggctgcccgtggtcatgatgg

SEQ ID NO: 4339 - DNA, 23 bp, Homo sapiens
  source 1..23: mol_type = genomic DNA
tggctgcccgtggtcatgatggc

SEQ ID NO: 4340 - DNA, 23 bp, Homo sapiens
  source 1..23: mol_type = genomic DNA
ggctgcccgtggtcatgatggct

SEQ ID NO: 4341 - DNA, 23 bp, Homo sapiens
  source 1..23: mol_type = genomic DNA
gctgcccgtggtcatgatggctt

SEQ ID NO: 4342 - DNA, 23 bp, Homo sapiens
  source 1..23: mol_type = genomic DNA
ctgcccgtggtcatgatggcttg

SEQ ID NO: 4343 - DNA, 23 bp, Homo sapiens
  source 1..23: mol_type = genomic DNA
tgcccgtggtcatgatggcttgt

SEQ ID NO: 4344 - DNA, 23 bp, Homo sapiens
  source 1..23: mol_type = genomic DNA
gcccgtggtcatgatggcttgtg

SEQ ID NO: 4345 - DNA, 23 bp, Homo sapiens
  source 1..23: mol_type = genomic DNA
cccgtggtcatgatggcttgtgg

SEQ ID NO: 4346 - DNA, 23 bp, Homo sapiens
  source 1..23: mol_type = genomic DNA
ccgtggtcatgatggcttgtggt

SEQ ID NO: 4347 - DNA, 23 bp, Homo sapiens
  source 1..23: mol_type = genomic DNA
cgtggtcatgatggcttgtggtc

SEQ ID NO: 4348 - DNA, 23 bp, Homo sapiens
  source 1..23: mol_type = genomic DNA
gtggtcatgatggcttgtggtcg

SEQ ID NO: 4349 - DNA, 23 bp, Homo sapiens
  source 1..23: mol_type = genomic DNA
tggtcatgatggcttgtggtcga

SEQ ID NO: 4350 - DNA, 23 bp, Homo sapiens
  source 1..23: mol_type = genomic DNA
ggtcatgatggcttgtggtcgag

SEQ ID NO: 4351 - DNA, 23 bp, Homo sapiens
  source 1..23: mol_type = genomic DNA
gtcatgatggcttgtggtcgagg

SEQ ID NO: 4352 - DNA, 23 bp, Homo sapiens
  source 1..23: mol_type = genomic DNA
tcatgatggcttgtggtcgaggc

SEQ ID NO: 4353 - DNA, 23 bp, Homo sapiens
  source 1..23: mol_type = genomic DNA
catgatggcttgtggtcgaggcg

SEQ ID NO: 4354 - DNA, 23 bp, Homo sapiens
  source 1..23: mol_type = genomic DNA
atgatggcttgtggtcgaggcgg

SEQ ID NO: 4355 - DNA, 23 bp, Homo sapiens
  source 1..23: mol_type = genomic DNA
tgatggcttgtggtcgaggcggg

SEQ ID NO: 4356 - DNA, 23 bp, Homo sapiens
  source 1..23: mol_type = genomic DNA
gatggcttgtggtcgaggcgggg

SEQ ID NO: 4357 - DNA, 23 bp, Homo sapiens
  source 1..23: mol_type = genomic DNA
atggcttgtggtcgaggcggggt

SEQ ID NO: 4358 - DNA, 23 bp, Homo sapiens
  source 1..23: mol_type = genomic DNA
tggcttgtggtcgaggcggggtg

SEQ ID NO: 4359 - DNA, 23 bp, Homo sapiens
  source 1..23: mol_type = genomic DNA
ggcttgtggtcgaggcggggtgg

SEQ ID NO: 4360 - DNA, 23 bp, Homo sapiens
  source 1..23: mol_type = genomic DNA
gcttgtggtcgaggcggggtggt

SEQ ID NO: 4361 - DNA, 23 bp, Homo sapiens
  source 1..23: mol_type = genomic DNA
cttgtggtcgaggcggggtggtg

SEQ ID NO: 4362 - DNA, 23 bp, Homo sapiens
  source 1..23: mol_type = genomic DNA
ttgtggtcgaggcggggtggtgg

SEQ ID NO: 4363 - DNA, 23 bp, Homo sapiens
  source 1..23: mol_type = genomic DNA
tgtggtcgaggcggggtggtggt

SEQ ID NO: 4364 - DNA, 23 bp, Homo sapiens
  source 1..23: mol_type = genomic DNA
gtggtcgaggcggggtggtggtt

SEQ ID NO: 4365 - DNA, 23 bp, Homo sapiens
  source 1..23: mol_type = genomic DNA
tggtcgaggcggggtggtggttg

SEQ ID NO: 4366 - DNA, 23 bp, Homo sapiens
  source 1..23: mol_type = genomic DNA
ggtcgaggcggggtggtggttgc

SEQ ID NO: 4367 - DNA, 23 bp, Homo sapiens
  source 1..23: mol_type = genomic DNA
gtcgaggcggggtggtggttgcc

SEQ ID NO: 4368 - DNA, 23 bp, Homo sapiens
  source 1..23: mol_type = genomic DNA
tcgaggcggggtggtggttgcca

SEQ ID NO: 4369 - DNA, 23 bp, Homo sapiens
  source 1..23: mol_type = genomic DNA
cgaggcggggtggtggttgccaa

SEQ ID NO: 4370 - DNA, 23 bp, Homo sapiens
  source 1..23: mol_type = genomic DNA
gaggcggggtggtggttgccaag

SEQ ID NO: 4371 - DNA, 23 bp, Homo sapiens
  source 1..23: mol_type = genomic DNA
aggcggggtggtggttgccaagc

SEQ ID NO: 4372 - DNA, 23 bp, Homo sapiens
  source 1..23: mol_type = genomic DNA
ggcggggtggtggttgccaagct

SEQ ID NO: 4373 - DNA, 23 bp, Homo sapiens
  source 1..23: mol_type = genomic DNA
gcggggtggtggttgccaagctg

SEQ ID NO: 4374 - DNA, 23 bp, Homo sapiens
  source 1..23: mol_type = genomic DNA
cggggtggtggttgccaagctgg

SEQ ID NO: 4375 - DNA, 23 bp, Homo sapiens
  source 1..23: mol_type = genomic DNA
ggggtggtggttgccaagctggc

SEQ ID NO: 4376 - DNA, 23 bp, Homo sapiens
  source 1..23: mol_type = genomic DNA
gggtggtggttgccaagctggcg

SEQ ID NO: 4377 - DNA, 23 bp, Homo sapiens
  source 1..23: mol_type = genomic DNA
ggtggtggttgccaagctggcgg

SEQ ID NO: 4378 - DNA, 23 bp, Homo sapiens
  source 1..23: mol_type = genomic DNA
gtggtggttgccaagctggcggg

SEQ ID NO: 4379 - DNA, 23 bp, Homo sapiens
  source 1..23: mol_type = genomic DNA
tggtggttgccaagctggcgggg

SEQ ID NO: 4380 - DNA, 23 bp, Homo sapiens
  source 1..23: mol_type = genomic DNA
ggtggttgccaagctggcggggg

SEQ ID NO: 4381 - DNA, 23 bp, Homo sapiens
  source 1..23: mol_type = genomic DNA
gtggttgccaagctggcggggga

SEQ ID NO: 4382 - DNA, 23 bp, Homo sapiens
  source 1..23: mol_type = genomic DNA
tggttgccaagctggcgggggag

SEQ ID NO: 4383 - DNA, 23 bp, Homo sapiens
  source 1..23: mol_type = genomic DNA
ggttgccaagctggcgggggagt

SEQ ID NO: 4384 - DNA, 23 bp, Homo sapiens
  source 1..23: mol_type = genomic DNA
gttgccaagctggcgggggagtg

SEQ ID NO: 4385 - DNA, 23 bp, Homo sapiens
  source 1..23: mol_type = genomic DNA
ttgccaagctggcgggggagtgg

SEQ ID NO: 4386 - DNA, 23 bp, Homo sapiens
  source 1..23: mol_type = genomic DNA
tgccaagctggcgggggagtggg

SEQ ID NO: 4387 - DNA, 23 bp, Homo sapiens
  source 1..23: mol_type = genomic DNA
gccaagctggcgggggagtgggt

SEQ ID NO: 4388 - DNA, 23 bp, Homo sapiens
  source 1..23: mol_type = genomic DNA
ccaagctggcgggggagtgggtg

SEQ ID NO: 4389 - DNA, 23 bp, Homo sapiens
  source 1..23: mol_type = genomic DNA
caagctggcgggggagtgggtgg

SEQ ID NO: 4390 - DNA, 23 bp, Homo sapiens
  source 1..23: mol_type = genomic DNA
aagctggcgggggagtgggtggg

SEQ ID NO: 4391 - DNA, 23 bp, Homo sapiens
  source 1..23: mol_type = genomic DNA
agctggcgggggagtgggtgggg

SEQ ID NO: 4392 - DNA, 23 bp, Homo sapiens
  source 1..23: mol_type = genomic DNA
gctggcgggggagtgggtgggga

SEQ ID NO: 4393 - DNA, 23 bp, Homo sapiens
  source 1..23: mol_type = genomic DNA
ctggcgggggagtgggtggggag

SEQ ID NO: 4394 - DNA, 23 bp, Homo sapiens
  source 1..23: mol_type = genomic DNA
tggcgggggagtgggtggggagg

SEQ ID NO: 4395 - DNA, 23 bp, Homo sapiens
  source 1..23: mol_type = genomic DNA
ggcgggggagtgggtggggaggg

SEQ ID NO: 4396 - DNA, 23 bp, Homo sapiens
  source 1..23: mol_type = genomic DNA
gcgggggagtgggtggggagggc

SEQ ID NO: 4397 - DNA, 23 bp, Homo sapiens
  source 1..23: mol_type = genomic DNA
cgggggagtgggtggggagggct

SEQ ID NO: 4398 - DNA, 23 bp, Homo sapiens
  source 1..23: mol_type = genomic DNA
gggggagtgggtggggagggctg

SEQ ID NO: 4399 - DNA, 23 bp, Homo sapiens
  source 1..23: mol_type = genomic DNA
ggggagtgggtggggagggctgg

SEQ ID NO: 4400 - DNA, 23 bp, Homo sapiens
  source 1..23: mol_type = genomic DNA
gggagtgggtggggagggctggg

SEQ ID NO: 4401 - DNA, 23 bp, Homo sapiens
  source 1..23: mol_type = genomic DNA
ggagtgggtggggagggctgggc

SEQ ID NO: 4402-4468 - skipped (67 entries)

SEQ ID NO: 4469 - RNA, 25 nt, synthetic construct
  source 1..25: mol_type = other RNA
  modified_base 7: mod_base = OTHER; note = A nucleoside-replacement group characterized by the lack of a nucleotide base
  modified_base 19: mod_base = OTHER; note = A nucleoside-replacement group characterized by the lack of a nucleotide base
caccacngactccatcccnccaccc

SEQ ID NO: 4470 - RNA, 25 nt, synthetic construct
  source 1..25: mol_type = other RNA
  modified_base 7: mod_base = OTHER; note = A nucleoside-replacement group characterized by the lack of a nucleotide base
  modified_base 19: mod_base = OTHER; note = A nucleoside-replacement group characterized by the lack of a nucleotide base
ctcgttnacacctgatggnctccag

SEQ ID NO: 4471 - RNA, 25 nt, synthetic construct
  source 1..25: mol_type = other RNA
  modified_base 7: mod_base = OTHER; note = A nucleoside-replacement group characterized by the lack of a nucleotide base
  modified_base 19: mod_base = OTHER; note = A nucleoside-replacement group characterized by the lack of a nucleotide base
agtcacnagaagaagcacngagaag

SEQ ID NO: 4472 - RNA, 25 nt, synthetic construct
  source 1..25: mol_type = other RNA
  modified_base 7: mod_base = OTHER; note = A nucleoside-replacement group characterized by the lack of a nucleotide base
  modified_base 19: mod_base = OTHER; note = A nucleoside-replacement group characterized by the lack of a nucleotide base
gctcttnaagcaaaccccnggcagg

SEQ ID NO: 4473 - RNA, 25 nt, synthetic construct
  source 1..25: mol_type = other RNA
  modified_base 9: mod_base = OTHER; note = A nucleoside-replacement group characterized by the lack of a nucleotide base
  modified_base 19: mod_base = OTHER; note = A nucleoside-replacement group characterized by the lack of a nucleotide base
caccactgnctccatcccnccaccc

SEQ ID NO: 4474 - RNA, 25 nt, synthetic construct
  source 1..25: mol_type = other RNA
  modified_base 9: mod_base = OTHER; note = A nucleoside-replacement group characterized by the lack of a nucleotide base
  modified_base 19: mod_base = OTHER; note = A nucleoside-replacement group characterized by the lack of a nucleotide base
ctcgttcanacctgatggnctccag

SEQ ID NO: 4475 - RNA, 25 nt, synthetic construct
  source 1..25: mol_type = other RNA
  modified_base 9: mod_base = OTHER; note = A nucleoside-replacement group characterized by the lack of a nucleotide base
  modified_base 19: mod_base = OTHER; note = A nucleoside-replacement group characterized by the lack of a nucleotide base
agtcacganaagaagcacngagaag

SEQ ID NO: 4476 - RNA, 25 nt, synthetic construct
  source 1..25: mol_type = other RNA
  modified_base 9: mod_base = OTHER; note = A nucleoside-replacement group characterized by the lack of a nucleotide base
  modified_base 19: mod_base = OTHER; note = A nucleoside-replacement group characterized by the lack of a nucleotide base
gctcttgangcaaaccccnggcagg

SEQ ID NO: 4477 - RNA, 23 nt, synthetic construct
  source 1..23: mol_type = other RNA
  modified_base 8: mod_base = OTHER; note = A nucleoside-replacement group characterized by the lack of a nucleotide base
  modified_base 16: mod_base = OTHER; note = A nucleoside-replacement group characterized by the lack of a nucleotide base
tcttgaancaaacccnaggcagg

SEQ ID NO: 4478 - RNA, 23 nt, synthetic construct
  source 1..23: mol_type = other RNA
  modified_base 8: mod_base = OTHER; note = A nucleoside-replacement group characterized by the lack of a nucleotide base
  modified_base 16: mod_base = OTHER; note = A nucleoside-replacement group characterized by the lack of a nucleotide base
gctcttgnagcaaacnccaggca

SEQ ID NO: 4479 - RNA, 23 nt, synthetic construct
  source 1..23: mol_type = other RNA
  modified_base 8: mod_base = OTHER; note = A nucleoside-replacement group characterized by the lack of a nucleotide base
  modified_base 16: mod_base = OTHER; note = A nucleoside-replacement group characterized by the lack of a nucleotide base
ctcttgangcaaaccncaggcag

SEQ ID NO: 4480 - RNA, 23 nt, synthetic construct
  source 1..23: mol_type = other RNA
  modified_base 8: mod_base = OTHER; note = A nucleoside-replacement group characterized by the lack of a nucleotide base
  modified_base 16: mod_base = OTHER; note = A nucleoside-replacement group characterized by the lack of a nucleotide base
ctgactcnatccctcnacccagg

SEQ ID NO: 4481 - RNA, 23 nt, synthetic construct
  source 1..23: mol_type = other RNA
  modified_base 8: mod_base = OTHER; note = A nucleoside-replacement group characterized by the lack of a nucleotide base
  modified_base 16: mod_base = OTHER; note = A nucleoside-replacement group characterized by the lack of a nucleotide base
cactgacnccatcccnccaccca

SEQ ID NO: 4482 - RNA, 23 nt, synthetic construct
  source 1..23: mol_type = other RNA
  modified_base 8: mod_base = OTHER; note = A nucleoside-replacement group characterized by the lack of a nucleotide base
  modified_base 16: mod_base = OTHER; note = A nucleoside-replacement group characterized by the lack of a nucleotide base
actgactncatccctncacccag

SEQ ID NO: 4483 - RNA, 23 nt, synthetic construct
  source 1..23: mol_type = other RNA
  modified_base 8: mod_base = OTHER; note = A nucleoside-replacement group characterized by the lack of a nucleotide base
  modified_base 16: mod_base = OTHER; note = A nucleoside-replacement group characterized by the lack of a nucleotide base
gagccacnactgactncatccct

SEQ ID NO: 4484 - RNA, 23 nt, synthetic construct
  source 1..23: mol_type = other RNA
  modified_base 8: mod_base = OTHER; note = A nucleoside-replacement group characterized by the lack of a nucleotide base
  modified_base 16: mod_base = OTHER; note = A nucleoside-replacement group characterized by the lack of a nucleotide base
cagagccnccactgantccatcc

SEQ ID NO: 4485 - RNA, 23 nt, synthetic construct
  source 1..23: mol_type = other RNA
  modified_base 8: mod_base = OTHER; note = A nucleoside-replacement group characterized by the lack of a nucleotide base
  modified_base 16: mod_base = OTHER; note = A nucleoside-replacement group characterized by the lack of a nucleotide base
agagccancactgacnccatccc

SEQ ID NO: 4486 - RNA, 23 nt, synthetic construct
  source 1..23: mol_type = other RNA
  modified_base 8: mod_base = OTHER; note = A nucleoside-replacement group characterized by the lack of a nucleotide base
  modified_base 16: mod_base = OTHER; note = A nucleoside-replacement group characterized by the lack of a nucleotide base
cgttcacncctgatgngctccag

SEQ ID NO: 4487 - RNA, 23 nt, synthetic construct
  source 1..23: mol_type = other RNA
  modified_base 8: mod_base = OTHER; note = A nucleoside-replacement group characterized by the lack of a nucleotide base
  modified_base 16: mod_base = OTHER; note = A nucleoside-replacement group characterized by the lack of a nucleotide base
ctcgttcncacctgangggctcc

SEQ ID NO: 4488 - RNA, 23 nt, synthetic construct
  source 1..23: mol_type = other RNA
  modified_base 8: mod_base = OTHER; note = A nucleoside-replacement group characterized by the lack of a nucleotide base
  modified_base 16: mod_base = OTHER; note = A nucleoside-replacement group characterized by the lack of a nucleotide base
tcgttcanacctgatnggctcca

SEQ ID NO: 4489 - RNA, 23 nt, synthetic construct
  source 1..23: mol_type = other RNA
  modified_base 8: mod_base = OTHER; note = A nucleoside-replacement group characterized by the lack of a nucleotide base
  modified_base 16: mod_base = OTHER; note = A nucleoside-replacement group characterized by the lack of a nucleotide base
agggaggntcgttcanacctgat

SEQ ID NO: 4490 - RNA, 23 nt, synthetic construct
  source 1..23: mol_type = other RNA
  modified_base 8: mod_base = OTHER; note = A nucleoside-replacement group characterized by the lack of a nucleotide base
  modified_base 16: mod_base = OTHER; note = A nucleoside-replacement group characterized by the lack of a nucleotide base
ggagggangctcgttnacacctg

SEQ ID NO: 4491 - RNA, 23 nt, synthetic construct
  source 1..23: mol_type = other RNA
  modified_base 8: mod_base = OTHER; note = A nucleoside-replacement group characterized by the lack of a nucleotide base
  modified_base 16: mod_base = OTHER; note = A nucleoside-replacement group characterized by the lack of a nucleotide base
gagggagnctcgttcncacctga

SEQ ID NO: 4492 - RNA, 23 nt, synthetic construct
  source 1..23: mol_type = other RNA
  modified_base 8: mod_base = OTHER; note = A nucleoside-replacement group characterized by the lack of a nucleotide base
  modified_base 16: mod_base = OTHER; note = A nucleoside-replacement group characterized by the lack of a nucleotide base
tcacgagnagaagcancgagaag

SEQ ID NO: 4493 - RNA, 23 nt, synthetic construct
  source 1..23: mol_type = other RNA
  modified_base 8: mod_base = OTHER; note = A nucleoside-replacement group characterized by the lack of a nucleotide base
  modified_base 16: mod_base = OTHER; note = A nucleoside-replacement group characterized by the lack of a nucleotide base
agtcacgngaagaagnaccgaga

SEQ ID NO: 4494 - RNA, 23 nt, synthetic construct
  source 1..23: mol_type = other RNA
  modified_base 8: mod_base = OTHER; note = A nucleoside-replacement group characterized by the lack of a nucleotide base
  modified_base 16: mod_base = OTHER; note = A nucleoside-replacement group characterized by the lack of a nucleotide base
gtcacganaagaagcnccgagaa

SEQ ID NO: 4495 - RNA, 25 nt, synthetic construct
  source 1..25: mol_type = other RNA
  modified_base 7: mod_base = OTHER; note = A nucleoside-replacement group characterized by the lack of a nucleotide base
  modified_base 19: mod_base = OTHER; note = A nucleoside-replacement group characterized by the lack of a nucleotide base
tcaacancatgaccaccancaccac

SEQ ID NO: 4496 - RNA, 25 nt, synthetic construct
  source 1..25: mol_type = other RNA
  modified_base 7: mod_base = OTHER; note = A nucleoside-replacement group characterized by the lack of a nucleotide base
  modified_base 19: mod_base = OTHER; note = A nucleoside-replacement group characterized by the lack of a nucleotide base
accagangcatcaccatcnccacca

SEQ ID NO: 4497 - RNA, 25 nt, synthetic construct
  source 1..25: mol_type = other RNA
  modified_base 7: mod_base = OTHER; note = A nucleoside-replacement group characterized by the lack of a nucleotide base
  modified_base 19: mod_base = OTHER; note = A nucleoside-replacement group characterized by the lack of a nucleotide base
gagacanaggaagccgatntaccag

SEQ ID NO: 4498 - RNA, 25 nt, synthetic construct
  source 1..25: mol_type = other RNA
  modified_base 7: mod_base = OTHER; note = A nucleoside-replacement group characterized by the lack of a nucleotide base
  modified_base 19: mod_base = OTHER; note = A nucleoside-replacement group characterized by the lack of a nucleotide base
aagtacnccaggaacgagnccagga

SEQ ID NO: 4499 - RNA, 25 nt, synthetic construct
  source 1..25: mol_type = other RNA
  modified_base 7: mod_base = OTHER; note = A nucleoside-replacement group characterized by the lack of a nucleotide base
  modified_base 19: mod_base = OTHER; note = A nucleoside-replacement group characterized by the lack of a nucleotide base
acagggncaggggtgtatnagcagg

SEQ ID NO: 4500 - RNA, 25 nt, synthetic construct
  source 1..25: mol_type = other RNA
  modified_base 7: mod_base = OTHER; note = A nucleoside-replacement group characterized by the lack of a nucleotide base
  modified_base 19: mod_base = OTHER; note = A nucleoside-replacement group characterized by the lack of a nucleotide base
tcgaccncaagccatcatnaccacg

SEQ ID NO: 4501 - RNA, 25 nt, synthetic construct
  source 1..25: mol_type = other RNA
  modified_base 9: mod_base = OTHER; note = A nucleoside-replacement group characterized by the lack of a nucleotide base
  modified_base 19: mod_base = OTHER; note = A nucleoside-replacement group characterized by the lack of a nucleotide base
tcaacaccntgaccaccancaccac

SEQ ID NO: 4502 - RNA, 25 nt, synthetic construct
  source 1..25: mol_type = other RNA
  modified_base 9: mod_base = OTHER; note = A nucleoside-replacement group characterized by the lack of a nucleotide base
  modified_base 19: mod_base = OTHER; note = A nucleoside-replacement group characterized by the lack of a nucleotide base
accagaagnatcaccatcnccacca

SEQ ID NO: 4503 - RNA, 25 nt, synthetic construct
  source 1..25: mol_type = other RNA
  modified_base 9: mod_base = OTHER; note = A nucleoside-replacement group characterized by the lack of a nucleotide base
  modified_base 19: mod_base = OTHER; note = A nucleoside-replacement group characterized by the lack of a nucleotide base
gagacaaangaagccgatntaccag

SEQ ID NO: 4504 - RNA, 25 nt, synthetic construct
  source 1..25: mol_type = other RNA
  modified_base 9: mod_base = OTHER; note = A nucleoside-replacement group characterized by the lack of a nucleotide base
  modified_base 19: mod_base = OTHER; note = A nucleoside-replacement group characterized by the lack of a nucleotide base
aagtacacnaggaacgagnccagga

SEQ ID NO: 4505 - RNA, 25 nt, synthetic construct
  source 1..25: mol_type = other RNA
  modified_base 9: mod_base = OTHER; note = A nucleoside-replacement group characterized by the lack of a nucleotide base
  modified_base 19: mod_base = OTHER; note = A nucleoside-replacement group characterized by the lack of a nucleotide base
acagggacnggggtgtatnagcagg

SEQ ID NO: 4506 - RNA, 25 nt, synthetic construct
  source 1..25: mol_type = other RNA
  modified_base 9: mod_base = OTHER; note = A nucleoside-replacement group characterized by the lack of a nucleotide base
  modified_base 19: mod_base = OTHER; note = A nucleoside-replacement group characterized by the lack of a nucleotide base
tcgaccacnagccatcatnaccacg

SEQ ID NO: 4507 - RNA, 23 nt, synthetic construct
  source 1..23: mol_type = other RNA
  modified_base 8: mod_base = OTHER; note = A nucleoside-replacement group characterized by the lack of a nucleotide base
  modified_base 16: mod_base = OTHER; note = A nucleoside-replacement group characterized by the lack of a nucleotide base
aacaccangaccaccntcaccac

SEQ ID NO: 4508 - RNA, 23 nt, synthetic construct
  source 1..23: mol_type = other RNA
  modified_base 8: mod_base = OTHER; note = A nucleoside-replacement group characterized by the lack of a nucleotide base
  modified_base 16: mod_base = OTHER; note = A nucleoside-replacement group characterized by the lack of a nucleotide base
tcaacacnatgaccancatcacc

SEQ ID NO: 4509 - RNA, 23 nt, synthetic construct
  source 1..23: mol_type = other RNA
  modified_base 8: mod_base = OTHER; note = A nucleoside-replacement group characterized by the lack of a nucleotide base
  modified_base 16: mod_base = OTHER; note = A nucleoside-replacement group characterized by the lack of a nucleotide base
caacaccntgaccacnatcacca

SEQ ID NO: 4510 - RNA, 23 nt, synthetic construct
  source 1..23: mol_type = other RNA
  modified_base 8: mod_base = OTHER; note = A nucleoside-replacement group characterized by the lack of a nucleotide base
  modified_base 16: mod_base = OTHER; note = A nucleoside-replacement group characterized by the lack of a nucleotide base
cagaagcntcaccatnaccacca

SEQ ID NO: 4511 - RNA, 23 nt, synthetic construct
  source 1..23: mol_type = other RNA
  modified_base 8: mod_base = OTHER; note = A nucleoside-replacement group characterized by the lack of a nucleotide base
  modified_base 16: mod_base = OTHER; note = A nucleoside-replacement group characterized by the lack of a nucleotide base
accagaancatcaccntcaccac

SEQ ID NO: 4512 - RNA, 23 nt, synthetic construct
  source 1..23: mol_type = other RNA
  modified_base 8: mod_base = OTHER; note = A nucleoside-replacement group characterized by the lack of a nucleotide base
  modified_base 16: mod_base = OTHER; note = A nucleoside-replacement group characterized by the lack of a nucleotide base
ccagaagnatcaccancaccacc

SEQ ID NO: 4513 - RNA, 23 nt, synthetic construct
  source 1..23: mol_type = other RNA
  modified_base 8: mod_base = OTHER; note = A nucleoside-replacement group characterized by the lack of a nucleotide base
  modified_base 16: mod_base = OTHER; note = A nucleoside-replacement group characterized by the lack of a nucleotide base
gacggcancaccatcntgaccac

SEQ ID NO: 4514 - RNA, 23 nt, synthetic construct
  source 1..23: mol_type = other RNA
  modified_base 8: mod_base = OTHER; note = A nucleoside-replacement group characterized by the lack of a nucleotide base
  modified_base 16: mod_base = OTHER; note = A nucleoside-replacement group characterized by the lack of a nucleotide base
cagacggnaccaccancatgacc

SEQ ID NO: 4515 - RNA, 23 nt, synthetic construct
  source 1..23: mol_type = other RNA
  modified_base 8: mod_base = OTHER; note = A nucleoside-replacement group characterized by the lack of a nucleotide base
  modified_base 16: mod_base = OTHER; note = A nucleoside-replacement group characterized by the lack of a nucleotide base
agacggcnccaccatnatgacca

SEQ ID NO: 4516 - RNA, 23 nt, synthetic construct
  source 1..23: mol_type = other RNA
  modified_base 8: mod_base = OTHER; note = A nucleoside-replacement group characterized by the lack of a nucleotide base
  modified_base 16: mod_base = OTHER; note = A nucleoside-replacement group characterized by the lack of a nucleotide base
ggccaggntgagacanaggaagc

SEQ ID NO: 4517 - RNA, 23 nt, synthetic construct
  source 1..23: mol_type = other RNA
  modified_base 8: mod_base = OTHER; note = A nucleoside-replacement group characterized by the lack of a nucleotide base
  modified_base 16: mod_base = OTHER; note = A nucleoside-replacement group characterized by the lack of a nucleotide base
gaggccangatgaganaaaggaa

SEQ ID NO: 4518 - RNA, 23 nt, synthetic construct
  source 1..23: mol_type = other RNA
  modified_base 8: mod_base = OTHER; note = A nucleoside-replacement group characterized by the lack of a nucleotide base
  modified_base 16: mod_base = OTHER; note = A nucleoside-replacement group characterized by the lack of a nucleotide base
aggccagnatgagacnaaggaag

SEQ ID NO: 4519 - RNA, 23 nt, synthetic construct
  source 1..23: mol_type = other RNA
  modified_base 8: mod_base = OTHER; note = A nucleoside-replacement group characterized by the lack of a nucleotide base
  modified_base 16: mod_base = OTHER; note = A nucleoside-replacement group characterized by the lack of a nucleotide base
gtacaccnggaacgangccagga

SEQ ID NO: 4520 - RNA, 23 nt, synthetic construct
  source 1..23: mol_type = other RNA
  modified_base 8: mod_base = OTHER; note = A nucleoside-replacement group characterized by the lack of a nucleotide base
  modified_base 16: mod_base = OTHER; note = A nucleoside-replacement group characterized by the lack of a nucleotide base
aagtacancaggaacnaggccag

SEQ ID NO: 4521 - RNA, 23 nt, synthetic construct
  source 1..23: mol_type = other RNA
  modified_base 8: mod_base = OTHER; note = A nucleoside-replacement group characterized by the lack of a nucleotide base
  modified_base 16: mod_base = OTHER; note = A nucleoside-replacement group characterized by the lack of a nucleotide base
agtacacnaggaacgnggccagg

SEQ ID NO: 4522 - RNA, 23 nt, synthetic construct
  source 1..23: mol_type = other RNA
  modified_base 8: mod_base = OTHER; note = A nucleoside-replacement group characterized by the lack of a nucleotide base
  modified_base 16: mod_base = OTHER; note = A nucleoside-replacement group characterized by the lack of a nucleotide base
aaagtggncgttctcncccttct

SEQ ID NO: 4523 - RNA, 23 nt, synthetic construct
  source 1..23: mol_type = other RNA
  modified_base 8: mod_base = OTHER; note = A nucleoside-replacement group characterized by the lack of a nucleotide base
  modified_base 16: mod_base = OTHER; note = A nucleoside-replacement group characterized by the lack of a nucleotide base
tcaaagtngtcgttcnccccctt

SEQ ID NO: 4524 - RNA, 23 nt, synthetic construct
  source 1..23: mol_type = other RNA
  modified_base 8: mod_base = OTHER; note = A nucleoside-replacement group characterized by the lack of a nucleotide base
  modified_base 16: mod_base = OTHER; note = A nucleoside-replacement group characterized by the lack of a nucleotide base
caaagtgntcgttctnccccttc

SEQ ID NO: 4525 - RNA, 23 nt, synthetic construct
  source 1..23: mol_type = other RNA
  modified_base 8: mod_base = OTHER; note = A nucleoside-replacement group characterized by the lack of a nucleotide base
  modified_base 16: mod_base = OTHER; note = A nucleoside-replacement group characterized by the lack of a nucleotide base
agggacangggtgtancagcagg

SEQ ID NO: 4526 - RNA, 23 nt, synthetic construct
  source 1..23: mol_type = other RNA
  modified_base 8: mod_base = OTHER; note = A nucleoside-replacement group characterized by the lack of a nucleotide base
  modified_base 16: mod_base = OTHER; note = A nucleoside-replacement group characterized by the lack of a nucleotide base
acaggganaggggtgnatcagca

SEQ ID NO: 4527 - RNA, 23 nt, synthetic construct
  source 1..23: mol_type = other RNA
  modified_base 8: mod_base = OTHER; note = A nucleoside-replacement group characterized by the lack of a nucleotide base
  modified_base 16: mod_base = OTHER; note = A nucleoside-replacement group characterized by the lack of a nucleotide base
cagggacnggggtgtntcagcag

SEQ ID NO: 4528 - RNA, 23 nt, synthetic construct
  source 1..23: mol_type = other RNA
  modified_base 8: mod_base = OTHER; note = A nucleoside-replacement group characterized by the lack of a nucleotide base
  modified_base 16: mod_base = OTHER; note = A nucleoside-replacement group characterized by the lack of a nucleotide base
gaccacangccatcangaccacg

SEQ ID NO: 4529 - RNA, 23 nt, synthetic construct
  source 1..23: mol_type = other RNA
  modified_base 8: mod_base = OTHER; note = A nucleoside-replacement group characterized by the lack of a nucleotide base
  modified_base 16: mod_base = OTHER; note = A nucleoside-replacement group characterized by the lack of a nucleotide base
tcgaccanaagccatnatgacca

SEQ ID NO: 4530 - RNA, 23 nt, synthetic construct
  source 1..23: mol_type = other RNA
  modified_base 8: mod_base = OTHER; note = A nucleoside-replacement group characterized by the lack of a nucleotide base
  modified_base 16: mod_base = OTHER; note = A nucleoside-replacement group characterized by the lack of a nucleotide base
cgaccacnagccatcntgaccac

SEQ ID NO: 4531 - DNA, 25 bp, synthetic construct
  source 1..25: mol_type = other DNA
ggaggggccgagcaatgaccctcac

SEQ ID NO: 4532 - DNA, 25 bp, synthetic construct
  source 1..25: mol_type = other DNA
gggaggggccgagcaatgaccctca

SEQ ID NO: 4533 - DNA, 25 bp, synthetic construct
  source 1..25: mol_type = other DNA
tgggaggggccgagcaatgaccctc

SEQ ID NO: 4534 - DNA, 25 bp, synthetic construct
  source 1..25: mol_type = other DNA
atgggaggggccgagcaatgaccct

SEQ ID NO: 4535 - DNA, 25 bp, synthetic construct
  source 1..25: mol_type = other DNA
catgggaggggccgagcaatgaccc

SEQ ID NO: 4536 - DNA, 25 bp, synthetic construct
  source 1..25: mol_type = other DNA
gcatgggaggggccgagcaatgacc

SEQ ID NO: 4537 - DNA, 25 bp, synthetic construct
  source 1..25: mol_type = other DNA
ggcatgggaggggccgagcaatgac

SEQ ID NO: 4538 - DNA, 25 bp, synthetic construct
  source 1..25: mol_type = other DNA
tggcatgggaggggccgagcaatga

SEQ ID NO: 4539 - DNA, 25 bp, synthetic construct
  source 1..25: mol_type = other DNA
gtggcatgggaggggccgagcaatg

SEQ ID NO: 4540 - DNA, 25 bp, synthetic construct
  source 1..25: mol_type = other DNA
agtggcatgggaggggccgagcaat

SEQ ID NO: 4541 - DNA, 25 bp, synthetic construct
  source 1..25: mol_type = other DNA
aagtggcatgggaggggccgagcaa

SEQ ID NO: 4542 - DNA, 25 bp, synthetic construct
  source 1..25: mol_type = other DNA
gaagtggcatgggaggggccgagca

SEQ ID NO: 4543 - DNA, 25 bp, synthetic construct
  source 1..25: mol_type = other DNA
ggaagtggcatgggaggggccgagc

SEQ ID NO: 4544 - DNA, 25 bp, synthetic construct
  source 1..25: mol_type = other DNA
tggaagtggcatgggaggggccgag

SEQ ID NO: 4545 - DNA, 25 bp, synthetic construct
  source 1..25: mol_type = other DNA
gtggaagtggcatgggaggggccga

SEQ ID NO: 4546 - DNA, 25 bp, synthetic construct
  source 1..25: mol_type = other DNA
agtggaagtggcatgggaggggccg

SEQ ID NO: 4547 - DNA, 25 bp, synthetic construct
  source 1..25: mol_type = other DNA
gagtggaagtggcatgggaggggcc

SEQ ID NO: 4548 - DNA, 25 bp, synthetic construct
  source 1..25: mol_type = other DNA
tgagtggaagtggcatgggaggggc

SEQ ID NO: 4549 - DNA, 25 bp, synthetic construct
  source 1..25: mol_type = other DNA
gtgagtggaagtggcatgggagggg

SEQ ID NO: 4550 - DNA, 25 bp, synthetic construct
  source 1..25: mol_type = other DNA
ggtgagtggaagtggcatgggaggg

SEQ ID NO: 4551 - DNA, 25 bp, synthetic construct
  source 1..25: mol_type = other DNA
tggtgagtggaagtggcatgggagg

SEQ ID NO: 4552 - DNA, 25 bp, synthetic construct
  source 1..25: mol_type = other DNA
atggtgagtggaagtggcatgggag

SEQ ID NO: 4553 - DNA, 25 bp, synthetic construct
  source 1..25: mol_type = other DNA
aatggtgagtggaagtggcatggga

SEQ ID NO: 4554 - DNA, 25 bp, synthetic construct
  source 1..25: mol_type = other DNA
gaatggtgagtggaagtggcatggg

SEQ ID NO: 4555 - DNA, 25 bp, synthetic construct
  source 1..25: mol_type = other DNA
ggaatggtgagtggaagtggcatgg

SEQ ID NO: 4556 - DNA, 25 bp, synthetic construct
  source 1..25: mol_type = other DNA
aggaatggtgagtggaagtggcatg

SEQ ID NO: 4557 - DNA, 25 bp, synthetic construct
  source 1..25: mol_type = other DNA
caggaatggtgagtggaagtggcat

SEQ ID NO: 4558 - DNA, 25 bp, synthetic construct
  source 1..25: mol_type = other DNA
gcaggaatggtgagtggaagtggca

SEQ ID NO: 4559 - DNA, 25 bp, synthetic construct
  source 1..25: mol_type = other DNA
ggcaggaatggtgagtggaagtggc

SEQ ID NO: 4560 - DNA, 25 bp, synthetic construct
  source 1..25: mol_type = other DNA
aggcaggaatggtgagtggaagtgg

SEQ ID NO: 4561 - DNA, 25 bp, synthetic construct
  source 1..25: mol_type = other DNA
caggcaggaatggtgagtggaagtg

SEQ ID NO: 4562 - DNA, 25 bp, synthetic construct
  source 1..25: mol_type = other DNA
gcaggcaggaatggtgagtggaagt

SEQ ID NO: 4563 - DNA, 25 bp, synthetic construct
  source 1..25: mol_type = other DNA
ggcaggcaggaatggtgagtggaag

SEQ ID NO: 4564 - DNA, 25 bp, synthetic construct
  source 1..25: mol_type = other DNA
gggcaggcaggaatggtgagtggaa

SEQ ID NO: 4565 - DNA, 25 bp, synthetic construct
  source 1..25: mol_type = other DNA
tgggcaggcaggaatggtgagtgga

SEQ ID NO: 4566 - DNA, 25 bp, synthetic construct
  source 1..25: mol_type = other DNA
ctgggcaggcaggaatggtgagtgg

SEQ ID NO: 4567 - DNA, 25 bp, synthetic construct
  source 1..25: mol_type = other DNA
gctgggcaggcaggaatggtgagtg

SEQ ID NO: 4568 - DNA, 25 bp, synthetic construct
  source 1..25: mol_type = other DNA
agctgggcaggcaggaatggtgagt

SEQ ID NO: 4569 - DNA, 25 bp, synthetic construct
  source 1..25: mol_type = other DNA
gagctgggcaggcaggaatggtgag

SEQ ID NO: 4570 - DNA, 25 bp, synthetic construct
  source 1..25: mol_type = other DNA
agagctgggcaggcaggaatggtga

SEQ ID NO: 4571 - DNA, 25 bp, synthetic construct
  source 1..25: mol_type = other DNA
aagagctgggcaggcaggaatggtg

SEQ ID NO: 4572 - DNA, 25 bp, synthetic construct
  source 1..25: mol_type = other DNA
gaagagctgggcaggcaggaatggt

SEQ ID NO: 4573 - DNA, 25 bp, synthetic construct
  source 1..25: mol_type = other DNA
ggaagagctgggcaggcaggaatgg

SEQ ID NO: 4574 - DNA, 25 bp, synthetic construct
  source 1..25: mol_type = other DNA
aggaagagctgggcaggcaggaatg

SEQ ID NO: 4575 - DNA, 25 bp, synthetic construct
  source 1..25: mol_type = other DNA
gaggaagagctgggcaggcaggaat

SEQ ID NO: 4576 - DNA, 25 bp, synthetic construct
  source 1..25: mol_type = other DNA
agaggaagagctgggcaggcaggaa

SEQ ID NO: 4577 - DNA, 25 bp, synthetic construct
  source 1..25: mol_type = other DNA
aagaggaagagctgggcaggcagga

SEQ ID NO: 4578 - DNA, 25 bp, synthetic construct
  source 1..25: mol_type = other DNA
aaagaggaagagctgggcaggcagg

SEQ ID NO: 4579 - DNA, 25 bp, synthetic construct
  source 1..25: mol_type = other DNA
gaaagaggaagagctgggcaggcag

SEQ ID NO: 4580 - DNA, 25 bp, synthetic construct
  source 1..25: mol_type = other DNA
agaaagaggaagagctgggcaggca

SEQ ID NO: 4581 - DNA, 25 bp, synthetic construct
  source 1..25: mol_type = other DNA
cagaaagaggaagagctgggcaggc

SEQ ID NO: 4582 - DNA, 25 bp, synthetic construct
  source 1..25: mol_type = other DNA
ccagaaagaggaagagctgggcagg

SEQ ID NO: 4583 - DNA, 25 bp, synthetic construct
  source 1..25: mol_type = other DNA
gccagaaagaggaagagctgggcag

SEQ ID NO: 4584 - DNA, 25 bp, synthetic construct
  source 1..25: mol_type = other DNA
ggccagaaagaggaagagctgggca

SEQ ID NO: 4585 - DNA, 25 bp, synthetic construct
  source 1..25: mol_type = other DNA
tggccagaaagaggaagagctgggc

SEQ ID NO: 4586 - DNA, 25 bp, synthetic construct
  source 1..25: mol_type = other DNA
gtggccagaaagaggaagagctggg

SEQ ID NO: 4587 - DNA, 25 bp, synthetic construct
  source 1..25: mol_type = other DNA
tgtggccagaaagaggaagagctgg

SEQ ID NO: 4588 - DNA, 25 bp, synthetic construct
  source 1..25: mol_type = other DNA
gtgtggccagaaagaggaagagctg

SEQ ID NO: 4589 - DNA, 25 bp, synthetic construct
  source 1..25: mol_type = other DNA
ggtgtggccagaaagaggaagagct

SEQ ID NO: 4590 - DNA, 25 bp, synthetic construct
  source 1..25: mol_type = other DNA
tggtgtggccagaaagaggaagagc

SEQ ID NO: 4591 - DNA, 25 bp, synthetic construct
  source 1..25: mol_type = other DNA
atggtgtggccagaaagaggaagag

SEQ ID NO: 4592 - DNA, 25 bp, synthetic construct
  source 1..25: mol_type = other DNA
gatggtgtggccagaaagaggaaga

SEQ ID NO: 4593 - DNA, 25 bp, synthetic construct
  source 1..25: mol_type = other DNA
ggatggtgtggccagaaagaggaag

SEQ ID NO: 4594 - DNA, 25 bp, synthetic construct
  source 1..25: mol_type = other DNA
tggatggtgtggccagaaagaggaa

SEQ ID NO: 4595 - DNA, 25 bp, synthetic construct
  source 1..25: mol_type = other DNA
gtggatggtgtggccagaaagagga

SEQ ID NO: 4596 - DNA, 25 bp, synthetic construct
  source 1..25: mol_type = other DNA
tgtggatggtgtggccagaaagagg

SEQ ID NO: 4597 - DNA, 25 bp, synthetic construct
  source 1..25: mol_type = other DNA
gtgtggatggtgtggccagaaagag

SEQ ID NO: 4598 - DNA, 25 bp, synthetic construct
  source 1..25: mol_type = other DNA
agtgtggatggtgtggccagaaaga

SEQ ID NO: 4599 - DNA, 25 bp, synthetic construct
  source 1..25: mol_type = other DNA
gagtgtggatggtgtggccagaaag

SEQ ID NO: 4600 - DNA, 25 bp, synthetic construct
  source 1..25: mol_type = other DNA
agagtgtggatggtgtggccagaaa

SEQ ID NO: 4601 - DNA, 25 bp, synthetic construct
  source 1..25: mol_type = other DNA
gagagtgtggatggtgtggccagaa

SEQ ID NO: 4602 - DNA, 25 bp, synthetic construct
  source 1..25: mol_type = other DNA
ggagagtgtggatggtgtggccaga

SEQ ID NO: 4603 - DNA, 25 bp, synthetic construct
  source 1..25: mol_type = other DNA
aggagagtgtggatggtgtggccag

SEQ ID NO: 4604 - DNA, 25 bp, synthetic construct
  source 1..25: mol_type = other DNA
caggagagtgtggatggtgtggcca

SEQ ID NO: 4605 - DNA, 25 bp, synthetic construct
  source 1..25: mol_type = other DNA
ccaggagagtgtggatggtgtggcc

SEQ ID NO: 4606 - DNA, 25 bp, synthetic construct
  source 1..25: mol_type = other DNA
gccaggagagtgtggatggtgtggc

SEQ ID NO: 4607 - DNA, 25 bp, synthetic construct
  source 1..25: mol_type = other DNA
ggccaggagagtgtggatggtgtgg

SEQ ID NO: 4608 - DNA, 25 bp, synthetic construct
  source 1..25: mol_type = other DNA
gggccaggagagtgtggatggtgtg

SEQ ID NO: 4609 - DNA, 25 bp, synthetic construct
  source 1..25: mol_type = other DNA
agggccaggagagtgtggatggtgt

SEQ ID NO: 4610 - DNA, 25 bp, synthetic construct
  source 1..25: mol_type = other DNA
gagggccaggagagtgtggatggtg

SEQ ID NO: 4611 - DNA, 25 bp, synthetic construct
  source 1..25: mol_type = other DNA
agagggccaggagagtgtggatggt

SEQ ID NO: 4612 - DNA, 25 bp, synthetic construct
  source 1..25: mol_type = other DNA
cagagggccaggagagtgtggatgg

SEQ ID NO: 4613 - DNA, 25 bp, synthetic construct
  source 1..25: mol_type = other DNA
tcagagggccaggagagtgtggatg

SEQ ID NO: 4614 - DNA, 25 bp, synthetic construct
  source 1..25: mol_type = other DNA
ctcagagggccaggagagtgtggat

SEQ ID NO: 4615 - DNA, 25 bp, synthetic construct
  source 1..25: mol_type = other DNA
tctcagagggccaggagagtgtgga

SEQ ID NO: 4616 - DNA, 25 bp, synthetic construct
  source 1..25: mol_type = other DNA
gtctcagagggccaggagagtgtgg

SEQ ID NO: 4617 - DNA, 25 bp, synthetic construct
  source 1..25: mol_type = other DNA
agtctcagagggccaggagagtgtg

SEQ ID NO: 4618 - DNA, 25 bp, synthetic construct
  source 1..25: mol_type = other DNA
cagtctcagagggccaggagagtgt

SEQ ID NO: 4619 - DNA, 25 bp, synthetic construct
  source 1..25: mol_type = other DNA
gcagtctcagagggccaggagagtg

SEQ ID NO: 4620 - DNA, 25 bp, synthetic construct
  source 1..25: mol_type = other DNA
ggcagtctcagagggccaggagagt

SEQ ID NO: 4621 - DNA, 25 bp, synthetic construct
  source 1..25: mol_type = other DNA
gggcagtctcagagggccaggagag

SEQ ID NO: 4622 - DNA, 25 bp, synthetic construct
  source 1..25: mol_type = other DNA
cgggcagtctcagagggccaggaga

SEQ ID NO: 4623 - DNA, 25 bp, synthetic construct
  source 1..25: mol_type = other DNA
gcgggcagtctcagagggccaggag

SEQ ID NO: 4624 - DNA, 25 bp, synthetic construct
  source 1..25: mol_type = other DNA
ggcgggcagtctcagagggccagga

SEQ ID NO: 4625 - DNA, 25 bp, synthetic construct
  source 1..25: mol_type = other DNA
tggcgggcagtctcagagggccagg

SEQ ID NO: 4626 - DNA, 25 bp, synthetic construct
  source 1..25: mol_type = other DNA
atggcgggcagtctcagagggccag

SEQ ID NO: 4627 - DNA, 25 bp, synthetic construct
  source 1..25: mol_type = other DNA
catggcgggcagtctcagagggcca

SEQ ID NO: 4628 - DNA, 25 bp, synthetic construct
  source 1..25: mol_type = other DNA
gcatggcgggcagtctcagagggcc

SEQ ID NO: 4629 - DNA, 25 bp, synthetic construct
  source 1..25: mol_type = other DNA
ggcatggcgggcagtctcagagggc

SEQ ID NO: 4630 - DNA, 25 bp, synthetic construct
  source 1..25: mol_type = other DNA
tggcatggcgggcagtctcagaggg

SEQ ID NO: 4631 - DNA, 25 bp, synthetic construct
  source 1..25: mol_type = other DNA
atggcatggcgggcagtctcagagg

SEQ ID NO: 4632 - DNA, 25 bp, synthetic construct
  source 1..25: mol_type = other DNA
aatggcatggcgggcagtctcagag

SEQ ID NO: 4633 - DNA, 25 bp, synthetic construct
  source 1..25: mol_type = other DNA
gaatggcatggcgggcagtctcaga

SEQ ID NO: 4634 - DNA, 25 bp, synthetic construct
  source 1..25: mol_type = other DNA
ggaatggcatggcgggcagtctcag

SEQ ID NO: 4635 - DNA, 25 bp, synthetic construct
  source 1..25: mol_type = other DNA
gggaatggcatggcgggcagtctca

SEQ ID NO: 4636 - DNA, 25 bp, synthetic construct
  source 1..25: mol_type = other DNA
agggaatggcatggcgggcagtctc

SEQ ID NO: 4637 - DNA, 25 bp, synthetic construct
  source 1..25: mol_type = other DNA
aagggaatggcatggcgggcagtct

SEQ ID NO: 4638 - DNA, 25 bp, synthetic construct
  source 1..25: mol_type = other DNA
aaagggaatggcatggcgggcagtc

SEQ ID NO: 4639 - DNA, 25 bp, synthetic construct
  source 1..25: mol_type = other DNA
taaagggaatggcatggcgggcagt

SEQ ID NO: 4640 - DNA, 25 bp, synthetic construct
  source 1..25: mol_type = other DNA
gtaaagggaatggcatggcgggcag

SEQ ID NO: 4641 - DNA, 25 bp, synthetic construct
  source 1..25: mol_type = other DNA
ggtaaagggaatggcatggcgggca

SEQ ID NO: 4642 - DNA, 25 bp, synthetic construct
  source 1..25: mol_type = other DNA
aggtaaagggaatggcatggcgggc

SEQ ID NO: 4643 - DNA, 25 bp, synthetic construct
  source 1..25: mol_type = other DNA
caggtaaagggaatggcatggcggg

SEQ ID NO: 4644 - DNA, 25 bp, synthetic construct
  source 1..25: mol_type = other DNA
ccaggtaaagggaatggcatggcgg

SEQ ID NO: 4645 - DNA, 25 bp, synthetic construct
  source 1..25: mol_type = other DNA
tccaggtaaagggaatggcatggcg

SEQ ID NO: 4646 - DNA, 25 bp, synthetic construct
  source 1..25: mol_type = other DNA
ttccaggtaaagggaatggcatggc

SEQ ID NO: 4647 - DNA, 25 bp, synthetic construct
  source 1..25: mol_type = other DNA
tttccaggtaaagggaatggcatgg

SEQ ID NO: 4648 - DNA, 25 bp, synthetic construct
  source 1..25: mol_type = other DNA
ttttccaggtaaagggaatggcatg

SEQ ID NO: 4649 - DNA, 25 bp, synthetic construct
  source 1..25: mol_type = other DNA
gttttccaggtaaagggaatggcat

SEQ ID NO: 4650 - DNA, 25 bp, synthetic construct
  source 1..25: mol_type = other DNA
agttttccaggtaaagggaatggca

SEQ ID NO: 4651 - DNA, 25 bp, synthetic construct
  source 1..25: mol_type = other DNA
gagttttccaggtaaagggaatggc

SEQ ID NO: 4652 - DNA, 25 bp, synthetic construct
  source 1..25: mol_type = other DNA
ggagttttccaggtaaagggaatgg

SEQ ID NO: 4653 - DNA, 25 bp, synthetic construct
  source 1..25: mol_type = other DNA
aggagttttccaggtaaagggaatg

SEQ ID NO: 4654 - DNA, 25 bp, synthetic construct
  source 1..25: mol_type = other DNA
gaggagttttccaggtaaagggaat

SEQ ID NO: 4655 - DNA, 25 bp, synthetic construct
  source 1..25: mol_type = other DNA
ggaggagttttccaggtaaagggaa

SEQ ID NO: 4656 - DNA, 25 bp, synthetic construct
  source 1..25: mol_type = other DNA
gggaggagttttccaggtaaaggga

SEQ ID NO: 4657 - DNA, 25 bp, synthetic construct
  source 1..25: mol_type = other DNA
agggaggagttttccaggtaaaggg

SEQ ID NO: 4658 - DNA, 25 bp, synthetic construct
  source 1..25: mol_type = other DNA
tagggaggagttttccaggtaaagg

SEQ ID NO: 4659 - DNA, 25 bp, synthetic construct
  source 1..25: mol_type = other DNA
atagggaggagttttccaggtaaag

SEQ ID NO: 4660 - DNA, 25 bp, synthetic construct
  source 1..25: mol_type = other DNA
gatagggaggagttttccaggtaaa

SEQ ID NO: 4661 - DNA, 25 bp, synthetic construct
  source 1..25: mol_type = other DNA
ggatagggaggagttttccaggtaa

SEQ ID NO: 4662 - DNA, 25 bp, synthetic construct
  source 1..25: mol_type = other DNA
tggatagggaggagttttccaggta

SEQ ID NO: 4663 - DNA, 25 bp, synthetic construct
  source 1..25: mol_type = other DNA
atggatagggaggagttttccaggt

SEQ ID NO: 4664 - DNA, 25 bp, synthetic construct
  source 1..25: mol_type = other DNA
gatggatagggaggagttttccagg

SEQ ID NO: 4665 - DNA, 25 bp, synthetic construct
  source 1..25: mol_type = other DNA
tgatggatagggaggagttttccag

SEQ ID NO: 4666 - DNA, 25 bp, synthetic construct
  source 1..25: mol_type = other DNA
ttgatggatagggaggagttttcca

SEQ ID NO: 4667 - DNA, 25 bp, synthetic construct
  source 1..25: mol_type = other DNA
tttgatggatagggaggagttttcc

SEQ ID NO: 4668 - DNA, 25 bp, synthetic construct
  source 1..25: mol_type = other DNA
ctttgatggatagggaggagttttc

SEQ ID NO: 4669 - DNA, 25 bp, synthetic construct
  source 1..25: mol_type = other DNA
actttgatggatagggaggagtttt

SEQ ID NO: 4670 - DNA, 25 bp, synthetic construct
  source 1..25: mol_type = other DNA
gactttgatggatagggaggagttt

SEQ ID NO: 4671 - DNA, 25 bp, synthetic construct
  source 1..25: mol_type = other DNA
ggactttgatggatagggaggagtt

SEQ ID NO: 4672 - DNA, 25 bp, synthetic construct
  source 1..25: mol_type = other DNA
tggactttgatggatagggaggagt

SEQ ID NO: 4673 - DNA, 25 bp, synthetic construct
  source 1..25: mol_type = other DNA
ctggactttgatggatagggaggag

SEQ ID NO: 4674 - DNA, 25 bp, synthetic construct
  source 1..25: mol_type = other DNA
tctggactttgatggatagggagga

SEQ ID NO: 4675 - DNA, 25 bp, synthetic construct
  source 1..25: mol_type = other DNA
atctggactttgatggatagggagg

SEQ ID NO: 4676 - DNA, 25 bp, synthetic construct
  source 1..25: mol_type = other DNA
aatctggactttgatggatagggag

SEQ ID NO: 4677 - DNA, 25 bp, synthetic construct
  source 1..25: mol_type = other DNA
gaatctggactttgatggataggga

SEQ ID NO: 4678 - DNA, 25 bp, synthetic construct
  source 1..25: mol_type = other DNA
tgaatctggactttgatggataggg

SEQ ID NO: 4679 - DNA, 25 bp, synthetic construct
  source 1..25: mol_type = other DNA
ctgaatctggactttgatggatagg

SEQ ID NO: 4680 - DNA, 25 bp, synthetic construct
  source 1..25: mol_type = other DNA
cctgaatctggactttgatggatag

SEQ ID NO: 4681 - DNA, 25 bp, synthetic construct
  source 1..25: mol_type = other DNA
ccctgaatctggactttgatggata

SEQ ID NO: 4682 - DNA, 25 bp, synthetic construct
  source 1..25: mol_type = other DNA
accctgaatctggactttgatggat

SEQ ID NO: 4683 - DNA, 25 bp, synthetic construct
  source 1..25: mol_type = other DNA
gaccctgaatctggactttgatgga

SEQ ID NO: 4684 - DNA, 25 bp, synthetic construct
  source 1..25: mol_type = other DNA
tgaccctgaatctggactttgatgg

SEQ ID NO: 4685 - DNA, 25 bp, synthetic construct
  source 1..25: mol_type = other DNA
gtgaccctgaatctggactttgatg

SEQ ID NO: 4686 - DNA, 25 bp, synthetic construct
  source 1..25: mol_type = other DNA
ggtgaccctgaatctggactttgat

SEQ ID NO: 4687 - DNA, 25 bp, synthetic construct
  source 1..25: mol_type = other DNA
aggtgaccctgaatctggactttga

SEQ ID NO: 4688 - DNA, 25 bp, synthetic construct
  source 1..25: mol_type = other DNA
gaggtgaccctgaatctggactttg

SEQ ID NO: 4689 - DNA, 25 bp, synthetic construct
  source 1..25: mol_type = other DNA
ggaggtgaccctgaatctggacttt

SEQ ID NO: 4690 - DNA, 25 bp, synthetic construct
  source 1..25: mol_type = other DNA
aggaggtgaccctgaatctggactt

SEQ ID NO: 4691 - DNA, 25 bp, synthetic construct
  source 1..25: mol_type = other DNA
gaggaggtgaccctgaatctggact

SEQ ID NO: 4692 - DNA, 25 bp, synthetic construct
  source 1..25: mol_type = other DNA
agaggaggtgaccctgaatctggac

SEQ ID NO: 4693 - DNA, 25 bp, synthetic construct
  source 1..25: mol_type = other DNA
cagaggaggtgaccctgaatctgga

SEQ ID NO: 4694 - DNA, 25 bp, synthetic construct
  source 1..25: mol_type = other DNA
ccagaggaggtgaccctgaatctgg

SEQ ID NO: 4695 - DNA, 25 bp, synthetic construct
  source 1..25: mol_type = other DNA
cccagaggaggtgaccctgaatctg

SEQ ID NO: 4696 - DNA, 25 bp, synthetic construct
  source 1..25: mol_type = other DNA
tcccagaggaggtgaccctgaatct

SEQ ID NO: 4697 - DNA, 25 bp, synthetic construct
  source 1..25: mol_type = other DNA
ttcccagaggaggtgaccctgaatc

SEQ ID NO: 4698 - DNA, 25 bp, synthetic construct
  source 1..25: mol_type = other DNA
cttcccagaggaggtgaccctgaat

SEQ ID NO: 4699 - DNA, 25 bp, synthetic construct
  source 1..25: mol_type = other DNA
gcttcccagaggaggtgaccctgaa

SEQ ID NO: 4700 - DNA, 25 bp, synthetic construct
  source 1..25: mol_type = other DNA
ggcttcccagaggaggtgaccctga

SEQ ID NO: 4701 - DNA, 25 bp, synthetic construct
  source 1..25: mol_type = other DNA
gggcttcccagaggaggtgaccctg

SEQ ID NO: 4702 - DNA, 25 bp, synthetic construct
  source 1..25: mol_type = other DNA
tgggcttcccagaggaggtgaccct

SEQ ID NO: 4703 - DNA, 25 bp, synthetic construct
  source 1..25: mol_type = other DNA
gtgggcttcccagaggaggtgaccc

SEQ ID NO: 4704 - DNA, 25 bp, synthetic construct
  source 1..25: mol_type = other DNA
ggtgggcttcccagaggaggtgacc

SEQ ID NO: 4705 - DNA, 25 bp, synthetic construct
  source 1..25: mol_type = other DNA
aggtgggcttcccagaggaggtgac

SEQ ID NO: 4706 - DNA, 25 bp, synthetic construct
  source 1..25: mol_type = other DNA
aaggtgggcttcccagaggaggtga

SEQ ID NO: 4707 - DNA, 25 bp, synthetic construct
  source 1..25: mol_type = other DNA
caaggtgggcttcccagaggaggtg

SEQ ID NO: 4708 - DNA, 25 bp, synthetic construct
  source 1..25: mol_type = other DNA
ccaaggtgggcttcccagaggaggt

SEQ ID NO: 4709 - DNA, 25 bp, synthetic construct
  source 1..25: mol_type = other DNA
gccaaggtgggcttcccagaggagg

SEQ ID NO: 4710 - DNA, 25 bp, synthetic construct
  source 1..25: mol_type = other DNA
ggccaaggtgggcttcccagaggag

SEQ ID NO: 4711 - DNA, 25 bp, synthetic construct
  source 1..25: mol_type = other DNA
aggccaaggtgggcttcccagagga

SEQ ID NO: 4712 - DNA, 25 bp, synthetic construct
  source 1..25: mol_type = other DNA
gaggccaaggtgggcttcccagagg

SEQ ID NO: 4713 - DNA, 25 bp, synthetic construct
  source 1..25: mol_type = other DNA
ggaggccaaggtgggcttcccagag

SEQ ID NO: 4714 - DNA, 25 bp, synthetic construct
  source 1..25: mol_type = other DNA
tggaggccaaggtgggcttcccaga

SEQ ID NO: 4715 - DNA, 25 bp, synthetic construct
  source 1..25: mol_type = other DNA
ctggaggccaaggtgggcttcccag

SEQ ID NO: 4716 - DNA, 25 bp, synthetic construct
  source 1..25: mol_type = other DNA
cctggaggccaaggtgggcttccca

SEQ ID NO: 4717 - DNA, 25 bp, synthetic construct
  source 1..25: mol_type = other DNA
acctggaggccaaggtgggcttccc

SEQ ID NO: 4718 - DNA, 25 bp, synthetic construct
  source 1..25: mol_type = other DNA
aacctggaggccaaggtgggcttcc

SEQ ID NO: 4719 - DNA, 25 bp, synthetic construct
  source 1..25: mol_type = other DNA
caacctggaggccaaggtgggcttc

SEQ ID NO: 4720 - DNA, 25 bp, synthetic construct
  source 1..25: mol_type = other DNA
tcaacctggaggccaaggtgggctt

SEQ ID NO: 4721 - DNA, 25 bp, synthetic construct
  source 1..25: mol_type = other DNA
gtcaacctggaggccaaggtgggct

SEQ ID NO: 4722 - DNA, 25 bp, synthetic construct
  source 1..25: mol_type = other DNA
agtcaacctggaggccaaggtgggc

SEQ ID NO: 4723 - DNA, 25 bp, synthetic construct
  source 1..25: mol_type = other DNA
gagtcaacctggaggccaaggtggg

SEQ ID NO: 4724 - DNA, 25 bp, synthetic construct
  source 1..25: mol_type = other DNA
agagtcaacctggaggccaaggtgg

SEQ ID NO: 4725 - DNA, 25 bp, synthetic construct
  source 1..25: mol_type = other DNA
gagagtcaacctggaggccaaggtg

SEQ ID NO: 4726 - DNA, 25 bp, synthetic construct
  source 1..25: mol_type = other DNA
tgagagtcaacctggaggccaaggt

SEQ ID NO: 4727 - DNA, 25 bp, synthetic construct
  source 1..25: mol_type = other DNA
gtgagagtcaacctggaggccaagg

SEQ ID NO: 4728 - DNA, 25 bp, synthetic construct
  source 1..25: mol_type = other DNA
agtgagagtcaacctggaggccaag

SEQ ID NO: 4729 - DNA, 25 bp, synthetic construct
  source 1..25: mol_type = other DNA
tagtgagagtcaacctggaggccaa

SEQ ID NO: 4730 - DNA, 25 bp, synthetic construct
  source 1..25: mol_type = other DNA
gtagtgagagtcaacctggaggcca

SEQ ID NO: 4731 - DNA, 25 bp, synthetic construct
  source 1..25: mol_type = other DNA
agtagtgagagtcaacctggaggcc

SEQ ID NO: 4732 - DNA, 25 bp, synthetic construct
  source 1..25: mol_type = other DNA
gagtagtgagagtcaacctggaggc

SEQ ID NO: 4733 - DNA, 25 bp, synthetic construct
  source 1..25: mol_type = other DNA
tgagtagtgagagtcaacctggagg

SEQ ID NO: 4734 - DNA, 25 bp, synthetic construct
  source 1..25: mol_type = other DNA
atgagtagtgagagtcaacctggag

SEQ ID NO: 4735 - DNA, 25 bp, synthetic construct
  source 1..25: mol_type = other DNA
gatgagtagtgagagtcaacctgga

SEQ ID NO: 4736 - DNA, 25 bp, synthetic construct
  source 1..25: mol_type = other DNA
tgatgagtagtgagagtcaacctgg

SEQ ID NO: 4737 - DNA, 25 bp, synthetic construct
  source 1..25: mol_type = other DNA
atgatgagtagtgagagtcaacctg

SEQ ID NO: 4738 - DNA, 25 bp, synthetic construct
  source 1..25: mol_type = other DNA
gatgatgagtagtgagagtcaacct

SEQ ID NO: 4739 - DNA, 25 bp, synthetic construct
  source 1..25: mol_type = other DNA
tgatgatgagtagtgagagtcaacc

SEQ ID NO: 4740 - DNA, 25 bp, synthetic construct
  source 1..25: mol_type = other DNA
ctgatgatgagtagtgagagtcaac

SEQ ID NO: 4741 - DNA, 25 bp, synthetic construct
  source 1..25: mol_type = other DNA
cctgatgatgagtagtgagagtcaa

SEQ ID NO: 4742 - DNA, 25 bp, synthetic construct
  source 1..25: mol_type = other DNA
acctgatgatgagtagtgagagtca

SEQ ID NO: 4743 - DNA, 25 bp, synthetic construct
  source 1..25: mol_type = other DNA
aacctgatgatgagtagtgagagtc

SEQ ID NO: 4744 - DNA, 25 bp, synthetic construct
  source 1..25: mol_type = other DNA
gaacctgatgatgagtagtgagagt

SEQ ID NO: 4745 - DNA, 25 bp, synthetic construct
  source 1..25: mol_type = other DNA
agaacctgatgatgagtagtgagag

SEQ ID NO: 4746 - DNA, 25 bp, synthetic construct
  source 1..25: mol_type = other DNA
aagaacctgatgatgagtagtgaga

SEQ ID NO: 4747 - DNA, 25 bp, synthetic construct
  source 1..25: mol_type = other DNA
gaagaacctgatgatgagtagtgag

SEQ ID NO: 4748 - DNA, 25 bp, synthetic construct
  source 1..25: mol_type = other DNA
ggaagaacctgatgatgagtagtga

SEQ ID NO: 4749 - DNA, 25 bp, synthetic construct
  source 1..25: mol_type = other DNA
aggaagaacctgatgatgagtagtg

SEQ ID NO: 4750 - DNA, 25 bp, synthetic construct
  source 1..25: mol_type = other DNA
aaggaagaacctgatgatgagtagt

SEQ ID NO: 4751 - DNA, 25 bp, synthetic construct
  source 1..25: mol_type = other DNA
gaaggaagaacctgatgatgagtag

SEQ ID NO: 4752 - DNA, 25 bp, synthetic construct
  source 1..25: mol_type = other DNA
agaaggaagaacctgatgatgagta

SEQ ID NO: 4753 - DNA, 25 bp, synthetic construct
  source 1..25: mol_type = other DNA
tagaaggaagaacctgatgatgagt

SEQ ID NO: 4754 - DNA, 25 bp, synthetic construct
  source 1..25: mol_type = other DNA
atagaaggaagaacctgatgatgag

SEQ ID NO: 4755 - DNA, 25 bp, synthetic construct
  source 1..25: mol_type = other DNA
aatagaaggaagaacctgatgatga

SEQ ID NO: 4756 - DNA, 25 bp, synthetic construct
  source 1..25: mol_type = other DNA
gaatagaaggaagaacctgatgatg

SEQ ID NO: 4757 - DNA, 25 bp, synthetic construct
  source 1..25: mol_type = other DNA
ggaatagaaggaagaacctgatgat

SEQ ID NO: 4758 - DNA, 25 bp, synthetic construct
  source 1..25: mol_type = other DNA
tggaatagaaggaagaacctgatga

SEQ ID NO: 4759 - DNA, 25 bp, synthetic construct
  source 1..25: mol_type = other DNA
ctggaatagaaggaagaacctgatg

SEQ ID NO: 4760 - DNA, 25 bp, synthetic construct
  source 1..25: mol_type = other DNA
gctggaatagaaggaagaacctgat

SEQ ID NO: 4761 - DNA, 25 bp, synthetic construct
  source 1..25: mol_type = other DNA
ggctggaatagaaggaagaacctga

SEQ ID NO: 4762 - DNA, 25 bp, synthetic construct
  source 1..25: mol_type = other DNA
gggctggaatagaaggaagaacctg

SEQ ID NO: 4763 - DNA, 25 bp, synthetic construct
  source 1..25: mol_type = other DNA
agggctggaatagaaggaagaacct

SEQ ID NO: 4764 - DNA, 25 bp, synthetic construct
  source 1..25: mol_type = other DNA
tagggctggaatagaaggaagaacc

SEQ ID NO: 4765 - DNA, 25 bp, synthetic construct
  source 1..25: mol_type = other DNA
ttagggctggaatagaaggaagaac

SEQ ID NO: 4766 - DNA, 25 bp, synthetic construct
  source 1..25: mol_type = other DNA
gttagggctggaatagaaggaagaa

SEQ ID NO: 4767 - DNA, 25 bp, synthetic construct
  source 1..25: mol_type = other DNA
ggttagggctggaatagaaggaaga

SEQ ID NO: 4768 - DNA, 25 bp, synthetic construct
  source 1..25: mol_type = other DNA
tggttagggctggaatagaaggaag

SEQ ID NO: 4769 - DNA, 25 bp, synthetic construct
  source 1..25: mol_type = other DNA
gtggttagggctggaatagaaggaa

SEQ ID NO: 4770 - DNA, 25 bp, synthetic construct
  source 1..25: mol_type = other DNA
agtggttagggctggaatagaagga

SEQ ID NO: 4771 - DNA, 25 bp, synthetic construct
  source 1..25: mol_type = other DNA
gagtggttagggctggaatagaagg

SEQ ID NO: 4772 - DNA, 25 bp, synthetic construct
  source 1..25: mol_type = other DNA
tgagtggttagggctggaatagaag

SEQ ID NO: 4773 - DNA, 25 bp, synthetic construct
  source 1..25: mol_type = other DNA
ctgagtggttagggctggaatagaa

SEQ ID NO: 4774 - DNA, 25 bp, synthetic construct
  source 1..25: mol_type = other DNA
cctgagtggttagggctggaataga

SEQ ID NO: 4775 - DNA, 25 bp, synthetic construct
  source 1..25: mol_type = other DNA
tcctgagtggttagggctggaatag

SEQ ID NO: 4776 - DNA, 25 bp, synthetic construct
  source 1..25: mol_type = other DNA
atcctgagtggttagggctggaata

SEQ ID NO: 4777 - DNA, 25 bp, synthetic construct
  source 1..25: mol_type = other DNA
aatcctgagtggttagggctggaat

SEQ ID NO: 4778 - DNA, 25 bp, synthetic construct
  source 1..25: mol_type = other DNA
caatcctgagtggttagggctggaa

SEQ ID NO: 4779 - DNA, 25 bp, synthetic construct
  source 1..25: mol_type = other DNA
ccaatcctgagtggttagggctgga

SEQ ID NO: 4780 - DNA, 25 bp, synthetic construct
  source 1..25: mol_type = other DNA
cccaatcctgagtggttagggctgg

SEQ ID NO: 4781 - DNA, 25 bp, synthetic construct
  source 1..25: mol_type = other DNA
gcccaatcctgagtggttagggctg

SEQ ID NO: 4782 - DNA, 25 bp, synthetic construct
  source 1..25: mol_type = other DNA
ggcccaatcctgagtggttagggct

SEQ ID NO: 4783 - DNA, 25 bp, synthetic construct
  source 1..25: mol_type = other DNA
cggcccaatcctgagtggttagggc

SEQ ID NO: 4784 - DNA, 25 bp, synthetic construct
  source 1..25: mol_type = other DNA
acggcccaatcctgagtggttaggg

SEQ ID NO: 4785 - DNA, 25 bp, synthetic construct
  source 1..25: mol_type = other DNA
aacggcccaatcctgagtggttagg

SEQ ID NO: 4786 - DNA, 25 bp, synthetic construct
  source 1..25: mol_type = other DNA
aaacggcccaatcctgagtggttag

SEQ ID NO: 4787 - DNA, 25 bp, synthetic construct
  source 1..25: mol_type = other DNA
caaacggcccaatcctgagtggtta

SEQ ID NO: 4788 - DNA, 25 bp, synthetic construct
  source 1..25: mol_type = other DNA
acaaacggcccaatcctgagtggtt

SEQ ID NO: 4789 - DNA, 25 bp, synthetic construct
  source 1..25: mol_type = other DNA
cacaaacggcccaatcctgagtggt

SEQ ID NO: 4790 - DNA, 25 bp, synthetic construct
  source 1..25: mol_type = other DNA
acacaaacggcccaatcctgagtgg

SEQ ID NO: 4791 - DNA, 25 bp, synthetic construct
  source 1..25: mol_type = other DNA
gacacaaacggcccaatcctgagtg

SEQ ID NO: 4792 - DNA, 25 bp, synthetic construct
  source 1..25: mol_type = other DNA
agacacaaacggcccaatcctgagt

SEQ ID NO: 4793 - DNA, 25 bp, synthetic construct
  source 1..25: mol_type = other DNA
cagacacaaacggcccaatcctgag

SEQ ID NO: 4794 - DNA, 25 bp, synthetic construct
  source 1..25: mol_type = other DNA
ccagacacaaacggcccaatcctga

SEQ ID NO: 4795 - DNA, 25 bp, synthetic construct
  source 1..25: mol_type = other DNA
cccagacacaaacggcccaatcctg

SEQ ID NO: 4796 - DNA, 25 bp, synthetic construct
  source 1..25: mol_type = other DNA
acccagacacaaacggcccaatcct

SEQ ID NO: 4797 - DNA, 25 bp, synthetic construct
  source 1..25: mol_type = other DNA
tacccagacacaaacggcccaatcc

SEQ ID NO: 4798 - DNA, 25 bp, synthetic construct
  source 1..25: mol_type = other DNA
atacccagacacaaacggcccaatc

SEQ ID NO: 4799 - DNA, 25 bp, synthetic construct
  source 1..25: mol_type = other DNA
catacccagacacaaacggcccaat

SEQ ID NO: 4800 - DNA, 25 bp, synthetic construct
  source 1..25: mol_type = other DNA
acatacccagacacaaacggcccaa

SEQ ID NO: 4801 - DNA, 25 bp, synthetic construct
  source 1..25: mol_type = other DNA
gacatacccagacacaaacggccca

SEQ ID NO: 4802 - DNA, 25 bp, synthetic construct
  source 1..25: mol_type = other DNA
agacatacccagacacaaacggccc

SEQ ID NO: 4803 - DNA, 25 bp, synthetic construct
  source 1..25: mol_type = other DNA
gagacatacccagacacaaacggcc

SEQ ID NO: 4804 - DNA, 25 bp, synthetic construct
  source 1..25: mol_type = other DNA
agagacatacccagacacaaacggc

SEQ ID NO: 4805 - DNA, 25 bp, synthetic construct
  source 1..25: mol_type = other DNA
aagagacatacccagacacaaacgg

SEQ ID NO: 4806 - DNA, 25 bp, synthetic construct
  source 1..25: mol_type = other DNA
gaagagacatacccagacacaaacg

SEQ ID NO: 4807 - DNA, 25 bp, synthetic construct
  source 1..25: mol_type = other DNA
ggaagagacatacccagacacaaac

SEQ ID NO: 4808 - DNA, 25 bp, synthetic construct
  source 1..25: mol_type = other DNA
tggaagagacatacccagacacaaa

SEQ ID NO: 4809 - DNA, 25 bp, synthetic construct
  source 1..25: mol_type = other DNA
ctggaagagacatacccagacacaa

SEQ ID NO: 4810 - DNA, 25 bp, synthetic construct
  source 1..25: mol_type = other DNA
gctggaagagacatacccagacaca

SEQ ID NO: 4811 - DNA, 25 bp, synthetic construct
  source 1..25: mol_type = other DNA
agctggaagagacatacccagacac

SEQ ID NO: 4812 - DNA, 25 bp, synthetic construct
  source 1..25: mol_type = other DNA
cagctggaagagacatacccagaca

SEQ ID NO: 4813 - DNA, 25 bp, synthetic construct
  source 1..25: mol_type = other DNA
gcagctggaagagacatacccagac

SEQ ID NO: 4814 - DNA, 25 bp, synthetic construct
  source 1..25: mol_type = other DNA
ggcagctggaagagacatacccaga

SEQ ID NO: 4815 - DNA, 25 bp, synthetic construct
  source 1..25: mol_type = other DNA
aggcagctggaagagacatacccag

SEQ ID NO: 4816 - DNA, 25 bp, synthetic construct
  source 1..25: mol_type = other DNA
caggcagctggaagagacataccca

SEQ ID NO: 4817 - DNA, 25 bp, synthetic construct
  source 1..25: mol_type = other DNA
ccaggcagctggaagagacataccc

SEQ ID NO: 4818 - DNA, 25 bp, synthetic construct
  source 1..25: mol_type = other DNA
cccaggcagctggaagagacatacc

SEQ ID NO: 4819 - DNA, 25 bp, synthetic construct
  source 1..25: mol_type = other DNA
acccaggcagctggaagagacatac

SEQ ID NO: 4820 - DNA, 25 bp, synthetic construct
  source 1..25: mol_type = other DNA
aacccaggcagctggaagagacata

SEQ ID NO: 4821 - DNA, 25 bp, synthetic construct
  source 1..25: mol_type = other DNA
aaacccaggcagctggaagagacat

SEQ ID NO: 4822 - DNA, 25 bp, synthetic construct
  source 1..25: mol_type = other DNA
gaaacccaggcagctggaagagaca

SEQ ID NO: 4823 - DNA, 25 bp, synthetic construct
  source 1..25: mol_type = other DNA
ggaaacccaggcagctggaagagac

SEQ ID NO: 4824 - DNA, 25 bp, synthetic construct
  source 1..25: mol_type = other DNA
aggaaacccaggcagctggaagaga

SEQ ID NO: 4825 - DNA, 25 bp, synthetic construct
  source 1..25: mol_type = other DNA
caggaaacccaggcagctggaagag

SEQ ID NO: 4826 - DNA, 25 bp, synthetic construct
  source 1..25: mol_type = other DNA
ccaggaaacccaggcagctggaaga

SEQ ID NO: 4827 - DNA, 25 bp, synthetic construct
  source 1..25: mol_type = other DNA
tccaggaaacccaggcagctggaag

SEQ ID NO: 4828 - DNA, 25 bp, synthetic construct
  source 1..25: mol_type = other DNA
ttccaggaaacccaggcagctggaa

SEQ ID NO: 4829 - DNA, 25 bp, synthetic construct
  source 1..25: mol_type = other DNA
tttccaggaaacccaggcagctgga

SEQ ID NO: 4830 - DNA, 25 bp, synthetic construct
  source 1..25: mol_type = other DNA
ctttccaggaaacccaggcagctgg

SEQ ID NO: 4831 - DNA, 25 bp, synthetic construct
  source 1..25: mol_type = other DNA
tctttccaggaaacccaggcagctg

SEQ ID NO: 4832 - DNA, 25 bp, synthetic construct
  source 1..25: mol_type = other DNA
ttctttccaggaaacccaggcagct

SEQ ID NO: 4833 - DNA, 25 bp, synthetic construct
  source 1..25: mol_type = other DNA
gttctttccaggaaacccaggcagc

SEQ ID NO: 4834 - DNA, 25 bp, synthetic construct
  source 1..25: mol_type = other DNA
agttctttccaggaaacccaggcag

SEQ ID NO: 4835 - DNA, 25 bp, synthetic construct
  source 1..25: mol_type = other DNA
gagttctttccaggaaacccaggca

SEQ ID NO: 4836 - DNA, 25 bp, synthetic construct
  source 1..25: mol_type = other DNA
agagttctttccaggaaacccaggc

SEQ ID NO: 4837 - DNA, 25 bp, synthetic construct
  source 1..25: mol_type = other DNA
aagagttctttccaggaaacccagg

SEQ ID NO: 4838 - DNA, 25 bp, synthetic construct
  source 1..25: mol_type = other DNA
taagagttctttccaggaaacccag

SEQ ID NO: 4839 - DNA, 25 bp, synthetic construct
  source 1..25: mol_type = other DNA
ataagagttctttccaggaaaccca

SEQ ID NO: 4840 - DNA, 25 bp, synthetic construct
  source 1..25: mol_type = other DNA
gataagagttctttccaggaaaccc

SEQ ID NO: 4841 - DNA, 25 bp, synthetic construct
  source 1..25: mol_type = other DNA
ggataagagttctttccaggaaacc

SEQ ID NO: 4842 - DNA, 25 bp, synthetic construct
  source 1..25: mol_type = other DNA
gggataagagttctttccaggaaac

SEQ ID NO: 4843 - DNA, 25 bp, synthetic construct
  source 1..25: mol_type = other DNA
ggggataagagttctttccaggaaa

SEQ ID NO: 4844 - DNA, 25 bp, synthetic construct
  source 1..25: mol_type = other DNA
tggggataagagttctttccaggaa

SEQ ID NO: 4845 - DNA, 25 bp, synthetic construct
  source 1..25: mol_type = other DNA
ctggggataagagttctttccagga

SEQ ID NO: 4846 - DNA, 25 bp, synthetic construct
  source 1..25: mol_type = other DNA
cctggggataagagttctttccagg

SEQ ID NO: 4847 - DNA, 25 bp, synthetic construct
  source 1..25: mol_type = other DNA
tcctggggataagagttctttccag

SEQ ID NO: 4848 - DNA, 25 bp, synthetic construct
  source 1..25: mol_type = other DNA
ttcctggggataagagttctttcca

SEQ ID NO: 4849 - DNA, 25 bp, synthetic construct
  source 1..25: mol_type = other DNA
gttcctggggataagagttctttcc

SEQ ID NO: 4850 - DNA, 25 bp, synthetic construct
  source 1..25: mol_type = other DNA
agttcctggggataagagttctttc

SEQ ID NO: 4851 - DNA, 25 bp, synthetic construct
  source 1..25: mol_type = other DNA
tagttcctggggataagagttcttt

SEQ ID NO: 4852 - DNA, 25 bp, synthetic construct
  source 1..25: mol_type = other DNA
ctagttcctggggataagagttctt

SEQ ID NO: 4853 - DNA, 25 bp, synthetic construct
  source 1..25: mol_type = other DNA
actagttcctggggataagagttct

SEQ ID NO: 4854 - DNA, 25 bp, synthetic construct
  source 1..25: mol_type = other DNA
aactagttcctggggataagagttc

SEQ ID NO: 4855 - DNA, 25 bp, synthetic construct
  source 1..25: mol_type = other DNA
aaactagttcctggggataagagtt

SEQ ID NO: 4856 - DNA, 25 bp, synthetic construct
  source 1..25: mol_type = other DNA
caaactagttcctggggataagagt

SEQ ID NO: 4857 - DNA, 25 bp, synthetic construct
  source 1..25: mol_type = other DNA
acaaactagttcctggggataagag

SEQ ID NO: 4858 - DNA, 25 bp, synthetic construct
  source 1..25: mol_type = other DNA
aacaaactagttcctggggataaga

SEQ ID NO: 4859 - DNA, 25 bp, synthetic construct
  source 1..25: mol_type = other DNA
caacaaactagttcctggggataag

SEQ ID NO: 4860 - DNA, 25 bp, synthetic construct
  source 1..25: mol_type = other DNA
tcaacaaactagttcctggggataa

SEQ ID NO: 4861 - DNA, 25 bp, synthetic construct
  source 1..25: mol_type = other DNA
ttcaacaaactagttcctggggata

SEQ ID NO: 4862 - DNA, 25 bp, synthetic construct
  source 1..25: mol_type = other DNA
attcaacaaactagttcctggggat

SEQ ID NO: 4863 - DNA, 25 bp, synthetic construct
  source 1..25: mol_type = other DNA
tattcaacaaactagttcctgggga

SEQ ID NO: 4864 - DNA, 25 bp, synthetic construct
  source 1..25: mol_type = other DNA
ttattcaacaaactagttcctgggg

SEQ ID NO: 4865 - DNA, 25 bp, synthetic construct
  source 1..25: mol_type = other DNA
tttattcaacaaactagttcctggg

SEQ ID NO: 4866 - DNA, 25 bp, synthetic construct
  source 1..25: mol_type = other DNA
atttattcaacaaactagttcctgg

SEQ ID NO: 4867 - DNA, 25 bp, synthetic construct
  source 1..25: mol_type = other DNA
catttattcaacaaactagttcctg

SEQ ID NO: 4868 - DNA, 25 bp, synthetic construct
  source 1..25: mol_type = other DNA
gcatttattcaacaaactagttcct

SEQ ID NO: 4869 - DNA, 25 bp, synthetic construct
  source 1..25: mol_type = other DNA
agcatttattcaacaaactagttcc

SEQ ID NO: 4870 - DNA, 25 bp, synthetic construct
  source 1..25: mol_type = other DNA
cagcatttattcaacaaactagttc

SEQ ID NO: 4871 - DNA, 25 bp, synthetic construct
  source 1..25: mol_type = other DNA
ccagcatttattcaacaaactagtt

SEQ ID NO: 4872 - DNA, 25 bp, synthetic construct
  source 1..25: mol_type = other DNA
accagcatttattcaacaaactagt

SEQ ID NO: 4873 - DNA, 25 bp, synthetic construct
  source 1..25: mol_type = other DNA
caccagcatttattcaacaaactag

SEQ ID NO: 4874 - DNA, 25 bp, synthetic construct
  source 1..25: mol_type = other DNA
tcaccagcatttattcaacaaacta

SEQ ID NO: 4875 - DNA, 25 bp, synthetic construct
  source 1..25: mol_type = other DNA
ttcaccagcatttattcaacaaact

SEQ ID NO: 4876 - DNA, 25 bp, synthetic construct
  source 1..25: mol_type = other DNA
attcaccagcatttattcaacaaac

SEQ ID NO: 4877 - DNA, 25 bp, synthetic construct
  source 1..25: mol_type = other DNA
cattcaccagcatttattcaacaaa

SEQ ID NO: 4878 - DNA, 25 bp, synthetic construct
  source 1..25: mol_type = other DNA
tcattcaccagcatttattcaacaa

SEQ ID NO: 4879 - DNA, 25 bp, synthetic construct
  source 1..25: mol_type = other DNA
ttcattcaccagcatttattcaaca

SEQ ID NO: 4880 - DNA, 25 bp, synthetic construct
  source 1..25: mol_type = other DNA
attcattcaccagcatttattcaac

SEQ ID NO: 4881 - DNA, 25 bp, synthetic construct
  source 1..25: mol_type = other DNA
cattcattcaccagcatttattcaa

SEQ ID NO: 4882 - DNA, 25 bp, synthetic construct
  source 1..25: mol_type = other DNA
tcattcattcaccagcatttattca

SEQ ID NO: 4883 - DNA, 25 bp, synthetic construct
  source 1..25: mol_type = other DNA
ttcattcattcaccagcatttattc

SEQ ID NO: 4884 - DNA, 25 bp, synthetic construct
  source 1..25: mol_type = other DNA
attcattcattcaccagcatttatt

SEQ ID NO: 4885 - DNA, 25 bp, synthetic construct
  source 1..25: mol_type = other DNA
cattcattcattcaccagcatttat

SEQ ID NO: 4886 - DNA, 25 bp, synthetic construct
  source 1..25: mol_type = other DNA
tcattcattcattcaccagcattta

SEQ ID NO: 4887 - DNA, 25 bp, synthetic construct
  source 1..25: mol_type = other DNA
atcattcattcattcaccagcattt

SEQ ID NO: 4888 - DNA, 25 bp, synthetic construct
  source 1..25: mol_type = other DNA
aatcattcattcattcaccagcatt

SEQ ID NO: 4889 - DNA, 25 bp, synthetic construct
  source 1..25: mol_type = other DNA
caatcattcattcattcaccagcat

SEQ ID NO: 4890 - DNA, 25 bp, synthetic construct
  source 1..25: mol_type = other DNA
tcaatcattcattcattcaccagca

SEQ ID NO: 4891 - DNA, 25 bp, synthetic construct
  source 1..25: mol_type = other DNA
ttcaatcattcattcattcaccagc

SEQ ID NO: 4892 - DNA, 25 bp, synthetic construct
  source 1..25: mol_type = other DNA
gttcaatcattcattcattcaccag

SEQ ID NO: 4893 - DNA, 25 bp, synthetic construct
  source 1..25: mol_type = other DNA
tgttcaatcattcattcattcacca

SEQ ID NO: 4894 - DNA, 25 bp, synthetic construct
  source 1..25: mol_type = other DNA
ctgttcaatcattcattcattcacc

SEQ ID NO: 4895 - DNA, 25 bp, synthetic construct
  source 1..25: mol_type = other DNA
tctgttcaatcattcattcattcac

SEQ ID NO: 4896 - DNA, 25 bp, synthetic construct
  source 1..25: mol_type = other DNA
atctgttcaatcattcattcattca

SEQ ID NO: 4897 - DNA, 25 bp, synthetic construct
  source 1..25: mol_type = other DNA
catctgttcaatcattcattcattc

SEQ ID NO: 4898 - DNA, 25 bp, synthetic construct
  source 1..25: mol_type = other DNA
tcatctgttcaatcattcattcatt

SEQ ID NO: 4899 - DNA, 25 bp, synthetic construct
  source 1..25: mol_type = other DNA
ttcatctgttcaatcattcattcat

SEQ ID NO: 4900 - DNA, 25 bp, synthetic construct
  source 1..25: mol_type = other DNA
attcatctgttcaatcattcattca

SEQ ID NO: 4901 - DNA, 25 bp, synthetic construct
  source 1..25: mol_type = other DNA
cattcatctgttcaatcattcattc

SEQ ID NO: 4902 - DNA, 25 bp, synthetic construct
  source 1..25: mol_type = other DNA
tcattcatctgttcaatcattcatt

SEQ ID NO: 4903 - DNA, 25 bp, synthetic construct
  source 1..25: mol_type = other DNA
ctcattcatctgttcaatcattcat

SEQ ID NO: 4904 - DNA, 25 bp, synthetic construct
  source 1..25: mol_type = other DNA
actcattcatctgttcaatcattca

SEQ ID NO: 4905 - DNA, 25 bp, synthetic construct
  source 1..25: mol_type = other DNA
cactcattcatctgttcaatcattc

SEQ ID NO: 4906 - DNA, 25 bp, synthetic construct
  source 1..25: mol_type = other DNA
tcactcattcatctgttcaatcatt

SEQ ID NO: 4907 - DNA, 25 bp, synthetic construct
  source 1..25: mol_type = other DNA
atcactcattcatctgttcaatcat

SEQ ID NO: 4908 - DNA, 25 bp, synthetic construct
  source 1..25: mol_type = other DNA
catcactcattcatctgttcaatca

SEQ ID NO: 4909 - DNA, 25 bp, synthetic construct
  source 1..25: mol_type = other DNA
tcatcactcattcatctgttcaatc

SEQ ID NO: 4910 - DNA, 25 bp, synthetic construct
  source 1..25: mol_type = other DNA
ctcatcactcattcatctgttcaat

SEQ ID NO: 4911 - DNA, 25 bp, synthetic construct
  source 1..25: mol_type = other DNA
actcatcactcattcatctgttcaa

SEQ ID NO: 4912 - DNA, 25 bp, synthetic construct
  source 1..25: mol_type = other DNA
tactcatcactcattcatctgttca

SEQ ID NO: 4913 - DNA, 25 bp, synthetic construct
  source 1..25: mol_type = other DNA
ctactcatcactcattcatctgttc

SEQ ID NO: 4914 - DNA, 25 bp, synthetic construct
  source 1..25: mol_type = other DNA
tctactcatcactcattcatctgtt

SEQ ID NO: 4915 - DNA, 25 bp, synthetic construct
  source 1..25: mol_type = other DNA
atctactcatcactcattcatctgt

SEQ ID NO: 4916 - DNA, 25 bp, synthetic construct
  source 1..25: mol_type = other DNA
tatctactcatcactcattcatctg

SEQ ID NO: 4917 - DNA, 25 bp, synthetic construct
  source 1..25: mol_type = other DNA
ttatctactcatcactcattcatct

SEQ ID NO: 4918 - DNA, 25 bp, synthetic construct
  source 1..25: mol_type = other DNA
tttatctactcatcactcattcatc

SEQ ID NO: 4919 - DNA, 25 bp, synthetic construct
  source 1..25: mol_type = other DNA
ttttatctactcatcactcattcat

SEQ ID NO: 4920 - DNA, 25 bp, synthetic construct
  source 1..25: mol_type = other DNA
cttttatctactcatcactcattca

SEQ ID NO: 4921 - DNA, 25 bp, synthetic construct
  source 1..25: mol_type = other DNA
ccttttatctactcatcactcattc

SEQ ID NO: 4922 - DNA, 25 bp, synthetic construct
  source 1..25: mol_type = other DNA
tccttttatctactcatcactcatt

SEQ ID NO: 4923 - DNA, 25 bp, synthetic construct
  source 1..25: mol_type = other DNA
atccttttatctactcatcactcat

SEQ ID NO: 4924 - DNA, 25 bp, synthetic construct
  source 1..25: mol_type = other DNA
catccttttatctactcatcactca

SEQ ID NO: 4925 - DNA, 25 bp, synthetic construct
  source 1..25: mol_type = other DNA
ccatccttttatctactcatcactc

SEQ ID NO: 4926 - DNA, 25 bp, synthetic construct
  source 1..25: mol_type = other DNA
tccatccttttatctactcatcact

SEQ ID NO: 4927 - DNA, 25 bp, synthetic construct
  source 1..25: mol_type = other DNA
atccatccttttatctactcatcac

SEQ ID NO: 4928 - DNA, 25 bp, synthetic construct
  source 1..25: mol_type = other DNA
catccatccttttatctactcatca

SEQ ID NO: 4929 - DNA, 25 bp, synthetic construct
  source 1..25: mol_type = other DNA
ccatccatccttttatctactcatc

SEQ ID NO: 4930 - DNA, 25 bp, synthetic construct
  source 1..25: mol_type = other DNA
tccatccatccttttatctactcat

SEQ ID NO: 4931 - DNA, 25 bp, synthetic construct
  source 1..25: mol_type = other DNA
ctccatccatccttttatctactca

SEQ ID NO: 4932 - DNA, 25 bp, synthetic construct
  source 1..25: mol_type = other DNA
tctccatccatccttttatctactc

SEQ ID NO: 4933 - DNA, 25 bp, synthetic construct
  source 1..25: mol_type = other DNA
ctctccatccatccttttatctact

SEQ ID NO: 4934 - DNA, 25 bp, synthetic construct
  source 1..25: mol_type = other DNA
tctctccatccatccttttatctac

SEQ ID NO: 4935 - DNA, 25 bp, synthetic construct
  source 1..25: mol_type = other DNA
atctctccatccatccttttatcta

SEQ ID NO: 4936 - DNA, 25 bp, synthetic construct
  source 1..25: mol_type = other DNA
catctctccatccatccttttatct

SEQ ID NO: 4937 - DNA, 25 bp, synthetic construct
  source 1..25: mol_type = other DNA
ccatctctccatccatccttttatc

SEQ ID NO: 4938 - DNA, 25 bp, synthetic construct
  source 1..25: mol_type = other DNA
cccatctctccatccatccttttat

SEQ ID NO: 4939 - DNA, 25 bp, synthetic construct
  source 1..25: mol_type = other DNA
acccatctctccatccatcctttta

SEQ ID NO: 4940 - DNA, 25 bp, synthetic construct
  source 1..25: mol_type = other DNA
cacccatctctccatccatcctttt

SEQ ID NO: 4941 - DNA, 25 bp, synthetic construct
  source 1..25: mol_type = other DNA
tcacccatctctccatccatccttt

SEQ ID NO: 4942 - DNA, 25 bp, synthetic construct
  source 1..25: mol_type = other DNA
ctcacccatctctccatccatcctt

SEQ ID NO: 4943 - DNA, 25 bp, synthetic construct
  source 1..25: mol_type = other DNA
actcacccatctctccatccatcct

SEQ ID NO: 4944 - DNA, 25 bp, synthetic construct
  source 1..25: mol_type = other DNA
tactcacccatctctccatccatcc

SEQ ID NO: 4945 - DNA, 25 bp, synthetic construct
  source 1..25: mol_type = other DNA
gtactcacccatctctccatccatc

SEQ ID NO: 4946 - DNA, 25 bp, synthetic construct
  source 1..25: mol_type = other DNA
tgtactcacccatctctccatccat

SEQ ID NO: 4947 - DNA, 25 bp, synthetic construct
  source 1..25: mol_type = other DNA
atgtactcacccatctctccatcca

SEQ ID NO: 4948 - DNA, 25 bp, synthetic construct
  source 1..25: mol_type = other DNA
catgtactcacccatctctccatcc

SEQ ID NO: 4949 - DNA, 25 bp, synthetic construct
  source 1..25: mol_type = other DNA
ccatgtactcacccatctctccatc

SEQ ID NO: 4950 - DNA, 25 bp, synthetic construct
  source 1..25: mol_type = other DNA
tccatgtactcacccatctctccat

SEQ ID NO: 4951 - DNA, 25 bp, synthetic construct
  source 1..25: mol_type = other DNA
atccatgtactcacccatctctcca

SEQ ID NO: 4952 - DNA, 25 bp, synthetic construct
  source 1..25: mol_type = other DNA
catccatgtactcacccatctctcc

SEQ ID NO: 4953 - DNA, 25 bp, synthetic construct
  source 1..25: mol_type = other DNA
ccatccatgtactcacccatctctc

SEQ ID NO: 4954 - DNA, 25 bp, synthetic construct
  source 1..25: mol_type = other DNA
tccatccatgtactcacccatctct

SEQ ID NO: 4955 - DNA, 25 bp, synthetic construct
  source 1..25: mol_type = other DNA
atccatccatgtactcacccatctc

SEQ ID NO: 4956 - DNA, 25 bp, synthetic construct
  source 1..25: mol_type = other DNA
tatccatccatgtactcacccatct

SEQ ID NO: 4957 - DNA, 25 bp, synthetic construct
  source 1..25: mol_type = other DNA
ctatccatccatgtactcacccatc

SEQ ID NO: 4958 - DNA, 25 bp, synthetic construct
  source 1..25: mol_type = other DNA
tctatccatccatgtactcacccat

SEQ ID NO: 4959 - DNA, 25 bp, synthetic construct
  source 1..25: mol_type = other DNA
atctatccatccatgtactcaccca

SEQ ID NO: 4960 - DNA, 25 bp, synthetic construct
  source 1..25: mol_type = other DNA
catctatccatccatgtactcaccc

SEQ ID NO: 4961 - DNA, 25 bp, synthetic construct
  source 1..25: mol_type = other DNA
ccatctatccatccatgtactcacc

SEQ ID NO: 4962 - DNA, 25 bp, synthetic construct
  source 1..25: mol_type = other DNA
tccatctatccatccatgtactcac

SEQ ID NO: 4963 - DNA, 25 bp, synthetic construct
  source 1..25: mol_type = other DNA
atccatctatccatccatgtactca

SEQ ID NO: 4964 - DNA, 25 bp, synthetic construct
  source 1..25: mol_type = other DNA
catccatctatccatccatgtactc

SEQ ID NO: 4965 - DNA, 25 bp, synthetic construct
  source 1..25: mol_type = other DNA
tcatccatctatccatccatgtact

SEQ ID NO: 4966 - DNA, 25 bp, synthetic construct
  source 1..25: mol_type = other DNA
ctcatccatctatccatccatgtac

SEQ ID NO: 4967 - DNA, 25 bp, synthetic construct
  source 1..25: mol_type = other DNA
actcatccatctatccatccatgta

SEQ ID NO: 4968 - DNA, 25 bp, synthetic construct
  source 1..25: mol_type = other DNA
aactcatccatctatccatccatgt

SEQ ID NO: 4969 - DNA, 25 bp, synthetic construct
  source 1..25: mol_type = other DNA
caactcatccatctatccatccatg

SEQ ID NO: 4970 - DNA, 25 bp, synthetic construct
  source 1..25: mol_type = other DNA
ccaactcatccatctatccatccat

SEQ ID NO: 4971 - DNA, 25 bp, synthetic construct
  source 1..25: mol_type = other DNA
accaactcatccatctatccatcca

SEQ ID NO: 4972 - DNA, 25 bp, synthetic construct
  source 1..25: mol_type = other DNA
caccaactcatccatctatccatcc

SEQ ID NO: 4973 - DNA, 25 bp, synthetic construct
  source 1..25: mol_type = other DNA
ccaccaactcatccatctatccatc

SEQ ID NO: 4974 - DNA, 25 bp, synthetic construct
  source 1..25: mol_type = other DNA
cccaccaactcatccatctatccat

SEQ ID NO: 4975 - DNA, 25 bp, synthetic construct
  source 1..25: mol_type = other DNA
acccaccaactcatccatctatcca

SEQ ID NO: 4976 - DNA, 25 bp, synthetic construct
  source 1..25: mol_type = other DNA
tacccaccaactcatccatctatcc

SEQ ID NO: 4977 - DNA, 25 bp, synthetic construct
  source 1..25: mol_type = other DNA
ctacccaccaactcatccatctatc

SEQ ID NO: 4978 - DNA, 25 bp, synthetic construct
  source 1..25: mol_type = other DNA
tctacccaccaactcatccatctat

SEQ ID NO: 4979 - DNA, 25 bp, synthetic construct
  source 1..25: mol_type = other DNA
atctacccaccaactcatccatcta

SEQ ID NO: 4980 - DNA, 25 bp, synthetic construct
  source 1..25: mol_type = other DNA
aatctacccaccaactcatccatct

SEQ ID NO: 4981 - DNA, 25 bp, synthetic construct
  source 1..25: mol_type = other DNA
gaatctacccaccaactcatccatc

SEQ ID NO: 4982 - DNA, 25 bp, synthetic construct
  source 1..25: mol_type = other DNA
cgaatctacccaccaactcatccat

SEQ ID NO: 4983 - DNA, 25 bp, synthetic construct
  source 1..25: mol_type = other DNA
acgaatctacccaccaactcatcca

SEQ ID NO: 4984 - DNA, 25 bp, synthetic construct
  source 1..25: mol_type = other DNA
cacgaatctacccaccaactcatcc

SEQ ID NO: 4985 - DNA, 25 bp, synthetic construct
  source 1..25: mol_type = other DNA
ccacgaatctacccaccaactcatc

SEQ ID NO: 4986 - DNA, 25 bp, synthetic construct
  source 1..25: mol_type = other DNA
gccacgaatctacccaccaactcat

SEQ ID NO: 4987 - DNA, 25 bp, synthetic construct
  source 1..25: mol_type = other DNA
agccacgaatctacccaccaactca

SEQ ID NO: 4988 - DNA, 25 bp, synthetic construct
  source 1..25: mol_type = other DNA
tagccacgaatctacccaccaactc

SEQ ID NO: 4989 - DNA, 25 bp, synthetic construct
  source 1..25: mol_type = other DNA
ctagccacgaatctacccaccaact

SEQ ID NO: 4990 - DNA, 25 bp, synthetic construct
  source 1..25: mol_type = other DNA
tctagccacgaatctacccaccaac

SEQ ID NO: 4991 - DNA, 25 bp, synthetic construct
  source 1..25: mol_type = other DNA
atctagccacgaatctacccaccaa

SEQ ID NO: 4992 - DNA, 25 bp, synthetic construct
  source 1..25: mol_type = other DNA
catctagccacgaatctacccacca

SEQ ID NO: 4993 - DNA, 25 bp, synthetic construct
  source 1..25: mol_type = other DNA
ccatctagccacgaatctacccacc

SEQ ID NO: 4994 - DNA, 25 bp, synthetic construct
  source 1..25: mol_type = other DNA
tccatctagccacgaatctacccac

SEQ ID NO: 4995 - DNA, 25 bp, synthetic construct
  source 1..25: mol_type = other DNA
atccatctagccacgaatctaccca

SEQ ID NO: 4996 - DNA, 25 bp, synthetic construct
  source 1..25: mol_type = other DNA
catccatctagccacgaatctaccc

SEQ ID NO: 4997 - DNA, 25 bp, synthetic construct
  source 1..25: mol_type = other DNA
tcatccatctagccacgaatctacc

SEQ ID NO: 4998 - DNA, 25 bp, synthetic construct
  source 1..25: mol_type = other DNA
atcatccatctagccacgaatctac

SEQ ID NO: 4999 - DNA, 25 bp, synthetic construct
  source 1..25: mol_type = other DNA
catcatccatctagccacgaatcta

SEQ ID NO: 5000 - DNA, 25 bp, synthetic construct
  source 1..25: mol_type = other DNA
ccatcatccatctagccacgaatct

SEQ ID NO: 5001 - DNA, 25 bp, synthetic construct
  source 1..25: mol_type = other DNA
tccatcatccatctagccacgaatc

SEQ ID NO: 5002 - DNA, 25 bp, synthetic construct
  source 1..25: mol_type = other DNA
atccatcatccatctagccacgaat

SEQ ID NO: 5003 - DNA, 25 bp, synthetic construct
  source 1..25: mol_type = other DNA
catccatcatccatctagccacgaa

SEQ ID NO: 5004 - DNA, 25 bp, synthetic construct
  source 1..25: mol_type = other DNA
ccatccatcatccatctagccacga

SEQ ID NO: 5005 - DNA, 25 bp, synthetic construct
  source 1..25: mol_type = other DNA
tccatccatcatccatctagccacg

SEQ ID NO: 5006 - DNA, 25 bp, synthetic construct
  source 1..25: mol_type = other DNA
atccatccatcatccatctagccac

SEQ ID NO: 5007 - DNA, 25 bp, synthetic construct
  source 1..25: mol_type = other DNA
catccatccatcatccatctagcca

SEQ ID NO: 5008 - DNA, 25 bp, synthetic construct
  source 1..25: mol_type = other DNA
ccatccatccatcatccatctagcc

SEQ ID NO: 5009 - DNA, 25 bp, synthetic construct
  source 1..25: mol_type = other DNA
tccatccatccatcatccatctagc

SEQ ID NO: 5010 - DNA, 25 bp, synthetic construct
  source 1..25: mol_type = other DNA
gtccatccatccatcatccatctag

SEQ ID NO: 5011 - DNA, 25 bp, synthetic construct
  source 1..25: mol_type = other DNA
tgtccatccatccatcatccatcta

SEQ ID NO: 5012 - DNA, 25 bp, synthetic construct
  source 1..25: mol_type = other DNA
ctgtccatccatccatcatccatct

SEQ ID NO: 5013 - DNA, 25 bp, synthetic construct
  source 1..25: mol_type = other DNA
tctgtccatccatccatcatccatc

SEQ ID NO: 5014 - DNA, 25 bp, synthetic construct
  source 1..25: mol_type = other DNA
atctgtccatccatccatcatccat

SEQ ID NO: 5015 - DNA, 25 bp, synthetic construct
  source 1..25: mol_type = other DNA
catctgtccatccatccatcatcca

SEQ ID NO: 5016 - DNA, 25 bp, synthetic construct
  source 1..25: mol_type = other DNA
ccatctgtccatccatccatcatcc

SEQ ID NO: 5017 - DNA, 25 bp, synthetic construct
  source 1..25: mol_type = other DNA
tccatctgtccatccatccatcatc

SEQ ID NO: 5018 - DNA, 25 bp, synthetic construct
  source 1..25: mol_type = other DNA
atccatctgtccatccatccatcat

SEQ ID NO: 5019 - DNA, 25 bp, synthetic construct
  source 1..25: mol_type = other DNA
catccatctgtccatccatccatca

SEQ ID NO: 5020 - DNA, 25 bp, synthetic construct
  source 1..25: mol_type = other DNA
ccatccatctgtccatccatccatc

SEQ ID NO: 5021 - DNA, 25 bp, synthetic construct
  source 1..25: mol_type = other DNA
tccatccatctgtccatccatccat

SEQ ID NO: 5022 - DNA, 25 bp, synthetic construct
  source 1..25: mol_type = other DNA
atccatccatctgtccatccatcca

SEQ ID NO: 5023 - DNA, 25 bp, synthetic construct
  source 1..25: mol_type = other DNA
tatccatccatctgtccatccatcc

SEQ ID NO: 5024 - DNA, 25 bp, synthetic construct
  source 1..25: mol_type = other DNA
atatccatccatctgtccatccatc

SEQ ID NO: 5025 - DNA, 25 bp, synthetic construct
  source 1..25: mol_type = other DNA
tatatccatccatctgtccatccat

SEQ ID NO: 5026 - DNA, 25 bp, synthetic construct
  source 1..25: mol_type = other DNA
atatatccatccatctgtccatcca

SEQ ID NO: 5027 - DNA, 25 bp, synthetic construct
  source 1..25: mol_type = other DNA
catatatccatccatctgtccatcc

SEQ ID NO: 5028 - DNA, 25 bp, synthetic construct
  source 1..25: mol_type = other DNA
tcatatatccatccatctgtccatc

SEQ ID NO: 5029 - DNA, 25 bp, synthetic construct
  source 1..25: mol_type = other DNA
atcatatatccatccatctgtccat

SEQ ID NO: 5030 - DNA, 25 bp, synthetic construct
  source 1..25: mol_type = other DNA
aatcatatatccatccatctgtcca

SEQ ID NO: 5031 - DNA, 25 bp, synthetic construct
  source 1..25: mol_type = other DNA
caatcatatatccatccatctgtcc

SEQ ID NO: 5032 - DNA, 25 bp, synthetic construct
  source 1..25: mol_type = other DNA
tcaatcatatatccatccatctgtc

SEQ ID NO: 5033 - DNA, 25 bp, synthetic construct
  source 1..25: mol_type = other DNA
ttcaatcatatatccatccatctgt

SEQ ID NO: 5034 - DNA, 25 bp, synthetic construct
  source 1..25: mol_type = other DNA
gttcaatcatatatccatccatctg

SEQ ID NO: 5035 - DNA, 25 bp, synthetic construct
  source 1..25: mol_type = other DNA
agttcaatcatatatccatccatct

SEQ ID NO: 5036 - DNA, 25 bp, synthetic construct
  source 1..25: mol_type = other DNA
tagttcaatcatatatccatccatc

SEQ ID NO: 5037 - DNA, 25 bp, synthetic construct
  source 1..25: mol_type = other DNA
atagttcaatcatatatccatccat

SEQ ID NO: 5038 - DNA, 25 bp, synthetic construct
  source 1..25: mol_type = other DNA
aatagttcaatcatatatccatcca

SEQ ID NO: 5039 - DNA, 25 bp, synthetic construct
  source 1..25: mol_type = other DNA
caatagttcaatcatatatccatcc

SEQ ID NO: 5040 - DNA, 25 bp, synthetic construct
  source 1..25: mol_type = other DNA
tcaatagttcaatcatatatccatc

SEQ ID NO: 5041 - DNA, 25 bp, synthetic construct
  source 1..25: mol_type = other DNA
ttcaatagttcaatcatatatccat

SEQ ID NO: 5042 - DNA, 25 bp, synthetic construct
  source 1..25: mol_type = other DNA
tttcaatagttcaatcatatatcca

SEQ ID NO: 5043 - DNA, 25 bp, synthetic construct
  source 1..25: mol_type = other DNA
ctttcaatagttcaatcatatatcc

SEQ ID NO: 5044 - DNA, 25 bp, synthetic construct
  source 1..25: mol_type = other DNA
actttcaatagttcaatcatatatc

SEQ ID NO: 5045 - DNA, 25 bp, synthetic construct
  source 1..25: mol_type = other DNA
tactttcaatagttcaatcatatat

SEQ ID NO: 5046 - DNA, 25 bp, synthetic construct
  source 1..25: mol_type = other DNA
atactttcaatagttcaatcatata

SEQ ID NO: 5047 - DNA, 25 bp, synthetic construct
  source 1..25: mol_type = other DNA
tatactttcaatagttcaatcatat

SEQ ID NO: 5048 - DNA, 25 bp, synthetic construct
  source 1..25: mol_type = other DNA
ctatactttcaatagttcaatcata

SEQ ID NO: 5049 - DNA, 25 bp, synthetic construct
  source 1..25: mol_type = other DNA
tctatactttcaatagttcaatcat

SEQ ID NO: 5050 - DNA, 25 bp, synthetic construct
  source 1..25: mol_type = other DNA
atctatactttcaatagttcaatca

SEQ ID NO: 5051 - DNA, 25 bp, synthetic construct
  source 1..25: mol_type = other DNA
catctatactttcaatagttcaatc

SEQ ID NO: 5052 - DNA, 25 bp, synthetic construct
  source 1..25: mol_type = other DNA
acatctatactttcaatagttcaat

SEQ ID NO: 5053 - DNA, 25 bp, synthetic construct
  source 1..25: mol_type = other DNA
tacatctatactttcaatagttcaa

SEQ ID NO: 5054 - DNA, 25 bp, synthetic construct
  source 1..25: mol_type = other DNA
atacatctatactttcaatagttca

SEQ ID NO: 5055 - DNA, 25 bp, synthetic construct
  source 1..25: mol_type = other DNA
catacatctatactttcaatagttc

SEQ ID NO: 5056 - DNA, 25 bp, synthetic construct
  source 1..25: mol_type = other DNA
ccatacatctatactttcaatagtt

SEQ ID NO: 5057 - DNA, 25 bp, synthetic construct
  source 1..25: mol_type = other DNA
tccatacatctatactttcaatagt

SEQ ID NO: 5058 - DNA, 25 bp, synthetic construct
  source 1..25: mol_type = other DNA
atccatacatctatactttcaatag

SEQ ID NO: 5059 - DNA, 25 bp, synthetic construct
  source 1..25: mol_type = other DNA
catccatacatctatactttcaata

SEQ ID NO: 5060 - DNA, 25 bp, synthetic construct
  source 1..25: mol_type = other DNA
ccatccatacatctatactttcaat

SEQ ID NO: 5061 - DNA, 25 bp, synthetic construct
  source 1..25: mol_type = other DNA
cccatccatacatctatactttcaa

SEQ ID NO: 5062 - DNA, 25 bp, synthetic construct
  source 1..25: mol_type = other DNA
acccatccatacatctatactttca

SEQ ID NO: 5063 - DNA, 25 bp, synthetic construct
  source 1..25: mol_type = other DNA
cacccatccatacatctatactttc

SEQ ID NO: 5064 - DNA, 25 bp, synthetic construct
  source 1..25: mol_type = other DNA
tcacccatccatacatctatacttt

SEQ ID NO: 5065 - DNA, 25 bp, synthetic construct
  source 1..25: mol_type = other DNA
ttcacccatccatacatctatactt

SEQ ID NO: 5066 - DNA, 25 bp, synthetic construct
  source 1..25: mol_type = other DNA
attcacccatccatacatctatact

SEQ ID NO: 5067 - DNA, 25 bp, synthetic construct
  source 1..25: mol_type = other DNA
aattcacccatccatacatctatac

SEQ ID NO: 5068 - DNA, 25 bp, synthetic construct
  source 1..25: mol_type = other DNA
aaattcacccatccatacatctata

SEQ ID NO: 5069 - DNA, 25 bp, synthetic construct
  source 1..25: mol_type = other DNA
caaattcacccatccatacatctat

SEQ ID NO: 5070 - DNA, 25 bp, synthetic construct
  source 1..25: mol_type = other DNA
ccaaattcacccatccatacatcta

SEQ ID NO: 5071 - DNA, 25 bp, synthetic construct
  source 1..25: mol_type = other DNA
cccaaattcacccatccatacatct

SEQ ID NO: 5072 - DNA, 25 bp, synthetic construct
  source 1..25: mol_type = other DNA
ccccaaattcacccatccatacatc

SEQ ID NO: 5073 - DNA, 25 bp, synthetic construct
  source 1..25: mol_type = other DNA
cccccaaattcacccatccatacat

SEQ ID NO: 5074 - DNA, 25 bp, synthetic construct
  source 1..25: mol_type = other DNA
acccccaaattcacccatccataca

SEQ ID NO: 5075 - DNA, 25 bp, synthetic construct
  source 1..25: mol_type = other DNA
tacccccaaattcacccatccatac

SEQ ID NO: 5076 - DNA, 25 bp, synthetic construct
  source 1..25: mol_type = other DNA
ttacccccaaattcacccatccata

SEQ ID NO: 5077 - DNA, 25 bp, synthetic construct
  source 1..25: mol_type = other DNA
attacccccaaattcacccatccat

SEQ ID NO: 5078 - DNA, 25 bp, synthetic construct
  source 1..25: mol_type = other DNA
aattacccccaaattcacccatcca

SEQ ID NO: 5079 - DNA, 25 bp, synthetic construct
  source 1..25: mol_type = other DNA
caattacccccaaattcacccatcc

SEQ ID NO: 5080 - DNA, 25 bp, synthetic construct
  source 1..25: mol_type = other DNA
acaattacccccaaattcacccatc

SEQ ID NO: 5081 - DNA, 25 bp, synthetic construct
  source 1..25: mol_type = other DNA
aacaattacccccaaattcacccat

SEQ ID NO: 5082 - DNA, 25 bp, synthetic construct
  source 1..25: mol_type = other DNA
taacaattacccccaaattcaccca

SEQ ID NO: 5083 - DNA, 25 bp, synthetic construct
  source 1..25: mol_type = other DNA
ctaacaattacccccaaattcaccc

SEQ ID NO: 5084 - DNA, 25 bp, synthetic construct
  source 1..25: mol_type = other DNA
tctaacaattacccccaaattcacc

SEQ ID NO: 5085 - DNA, 25 bp, synthetic construct
  source 1..25: mol_type = other DNA
atctaacaattacccccaaattcac

SEQ ID NO: 5086 - DNA, 25 bp, synthetic construct
  source 1..25: mol_type = other DNA
catctaacaattacccccaaattca

SEQ ID NO: 5087 - DNA, 25 bp, synthetic construct
  source 1..25: mol_type = other DNA
tcatctaacaattacccccaaattc

SEQ ID NO: 5088 - DNA, 25 bp, synthetic construct
  source 1..25: mol_type = other DNA
atcatctaacaattacccccaaatt

SEQ ID NO: 5089 - DNA, 25 bp, synthetic construct
  source 1..25: mol_type = other DNA
catcatctaacaattacccccaaat

SEQ ID NO: 5090 - DNA, 25 bp, synthetic construct
  source 1..25: mol_type = other DNA
ccatcatctaacaattacccccaaa

SEQ ID NO: 5091 - DNA, 25 bp, synthetic construct
  source 1..25: mol_type = other DNA
tccatcatctaacaattacccccaa

SEQ ID NO: 5092 - DNA, 25 bp, synthetic construct
  source 1..25: mol_type = other DNA
atccatcatctaacaattaccccca

SEQ ID NO: 5093 - DNA, 25 bp, synthetic construct
  source 1..25: mol_type = other DNA
catccatcatctaacaattaccccc

SEQ ID NO: 5094 - DNA, 25 bp, synthetic construct
  source 1..25: mol_type = other DNA
tcatccatcatctaacaattacccc

SEQ ID NO: 5095 - DNA, 25 bp, synthetic construct
  source 1..25: mol_type = other DNA
ctcatccatcatctaacaattaccc

SEQ ID NO: 5096 - DNA, 25 bp, synthetic construct
  source 1..25: mol_type = other DNA
actcatccatcatctaacaattacc

SEQ ID NO: 5097 - DNA, 25 bp, synthetic construct
  source 1..25: mol_type = other DNA
tactcatccatcatctaacaattac

SEQ ID NO: 5098 - DNA, 25 bp, synthetic construct
  source 1..25: mol_type = other DNA
atactcatccatcatctaacaatta

SEQ ID NO: 5099 - DNA, 25 bp, synthetic construct
  source 1..25: mol_type = other DNA
tatactcatccatcatctaacaatt

SEQ ID NO: 5100 - DNA, 25 bp, synthetic construct
  source 1..25: mol_type = other DNA
ctatactcatccatcatctaacaat

SEQ ID NO: 5101 - DNA, 25 bp, synthetic construct
  source 1..25: mol_type = other DNA
tctatactcatccatcatctaacaa

SEQ ID NO: 5102 - DNA, 25 bp, synthetic construct
  source 1..25: mol_type = other DNA
atctatactcatccatcatctaaca

SEQ ID NO: 5103 - DNA, 25 bp, synthetic construct
  source 1..25: mol_type = other DNA
catctatactcatccatcatctaac

SEQ ID NO: 5104 - DNA, 25 bp, synthetic construct
  source 1..25: mol_type = other DNA
tcatctatactcatccatcatctaa

SEQ ID NO: 5105 - DNA, 25 bp, synthetic construct
  source 1..25: mol_type = other DNA
ttcatctatactcatccatcatcta

SEQ ID NO: 5106 - DNA, 25 bp, synthetic construct
  source 1..25: mol_type = other DNA
attcatctatactcatccatcatct

SEQ ID NO: 5107 - DNA, 25 bp, synthetic construct
  source 1..25: mol_type = other DNA
cattcatctatactcatccatcatc

SEQ ID NO: 5108 - DNA, 25 bp, synthetic construct
  source 1..25: mol_type = other DNA
tcattcatctatactcatccatcat

SEQ ID NO: 5109 - DNA, 25 bp, synthetic construct
  source 1..25: mol_type = other DNA
atcattcatctatactcatccatca

SEQ ID NO: 5110 - DNA, 25 bp, synthetic construct
  source 1..25: mol_type = other DNA
catcattcatctatactcatccatc

SEQ ID NO: 5111 - DNA, 25 bp, synthetic construct
  source 1..25: mol_type = other DNA
ccatcattcatctatactcatccat

SEQ ID NO: 5112 - DNA, 25 bp, synthetic construct
  source 1..25: mol_type = other DNA
tccatcattcatctatactcatcca

SEQ ID NO: 5113 - DNA, 25 bp, synthetic construct
  source 1..25: mol_type = other DNA
atccatcattcatctatactcatcc

SEQ ID NO: 5114 - DNA, 25 bp, synthetic construct
  source 1..25: mol_type = other DNA
catccatcattcatctatactcatc

SEQ ID NO: 5115 - DNA, 25 bp, synthetic construct
  source 1..25: mol_type = other DNA
ccatccatcattcatctatactcat

SEQ ID NO: 5116 - DNA, 25 bp, synthetic construct
  source 1..25: mol_type = other DNA
tccatccatcattcatctatactca

SEQ ID NO: 5117 - DNA, 25 bp, synthetic construct
  source 1..25: mol_type = other DNA
atccatccatcattcatctatactc

SEQ ID NO: 5118 - DNA, 25 bp, synthetic construct
  source 1..25: mol_type = other DNA
tatccatccatcattcatctatact

SEQ ID NO: 5119 - DNA, 25 bp, synthetic construct
  source 1..25: mol_type = other DNA
ttatccatccatcattcatctatac

SEQ ID NO: 5120 - DNA, 25 bp, synthetic construct
  source 1..25: mol_type = other DNA
gttatccatccatcattcatctata

SEQ ID NO: 5121 - DNA, 25 bp, synthetic construct
  source 1..25: mol_type = other DNA
agttatccatccatcattcatctat

SEQ ID NO: 5122 - DNA, 25 bp, synthetic construct
  source 1..25: mol_type = other DNA
aagttatccatccatcattcatcta

SEQ ID NO: 5123 - DNA, 25 bp, synthetic construct
  source 1..25: mol_type = other DNA
caagttatccatccatcattcatct

SEQ ID NO: 5124 - DNA, 25 bp, synthetic construct
  source 1..25: mol_type = other DNA
tcaagttatccatccatcattcatc

SEQ ID NO: 5125 - DNA, 25 bp, synthetic construct
  source 1..25: mol_type = other DNA
atcaagttatccatccatcattcat

SEQ ID NO: 5126 - DNA, 25 bp, synthetic construct
  source 1..25: mol_type = other DNA
catcaagttatccatccatcattca

SEQ ID NO: 5127 - DNA, 25 bp, synthetic construct
  source 1..25: mol_type = other DNA
tcatcaagttatccatccatcattc

SEQ ID NO: 5128 - DNA, 25 bp, synthetic construct
  source 1..25: mol_type = other DNA
ctcatcaagttatccatccatcatt

SEQ ID NO: 5129 - DNA, 25 bp, synthetic construct
  source 1..25: mol_type = other DNA
actcatcaagttatccatccatcat

SEQ ID NO: 5130 - DNA, 25 bp, synthetic construct
  source 1..25: mol_type = other DNA
cactcatcaagttatccatccatca

SEQ ID NO: 5131 - DNA, 25 bp, synthetic construct
  source 1..25: mol_type = other DNA
ccactcatcaagttatccatccatc

SEQ ID NO: 5132 - DNA, 25 bp, synthetic construct
  source 1..25: mol_type = other DNA
tccactcatcaagttatccatccat

SEQ ID NO: 5133 - DNA, 25 bp, synthetic construct
  source 1..25: mol_type = other DNA
atccactcatcaagttatccatcca

SEQ ID NO: 5134 - DNA, 25 bp, synthetic construct
  source 1..25: mol_type = other DNA
tatccactcatcaagttatccatcc

SEQ ID NO: 5135 - DNA, 25 bp, synthetic construct
  source 1..25: mol_type = other DNA
ctatccactcatcaagttatccatc

SEQ ID NO: 5136 - DNA, 25 bp, synthetic construct
  source 1..25: mol_type = other DNA
tctatccactcatcaagttatccat

SEQ ID NO: 5137 - DNA, 25 bp, synthetic construct
  source 1..25: mol_type = other DNA
atctatccactcatcaagttatcca

SEQ ID NO: 5138 - DNA, 25 bp, synthetic construct
  source 1..25: mol_type = other DNA
tatctatccactcatcaagttatcc

SEQ ID NO: 5139 - DNA, 25 bp, synthetic construct
  source 1..25: mol_type = other DNA
ctatctatccactcatcaagttatc

SEQ ID NO: 5140 - DNA, 25 bp, synthetic construct
  source 1..25: mol_type = other DNA
tctatctatccactcatcaagttat

SEQ ID NO: 5141 - DNA, 25 bp, synthetic construct
  source 1..25: mol_type = other DNA
atctatctatccactcatcaagtta

SEQ ID NO: 5142 - DNA, 25 bp, synthetic construct
  source 1..25: mol_type = other DNA
aatctatctatccactcatcaagtt

SEQ ID NO: 5143 - DNA, 25 bp, synthetic construct
  source 1..25: mol_type = other DNA
caatctatctatccactcatcaagt

SEQ ID NO: 5144 - DNA, 25 bp, synthetic construct
  source 1..25: mol_type = other DNA
gcaatctatctatccactcatcaag

SEQ ID NO: 5145 - DNA, 25 bp, synthetic construct
  source 1..25: mol_type = other DNA
agcaatctatctatccactcatcaa

SEQ ID NO: 5146 - DNA, 25 bp, synthetic construct
  source 1..25: mol_type = other DNA
cagcaatctatctatccactcatca

SEQ ID NO: 5147 - DNA, 25 bp, synthetic construct
  source 1..25: mol_type = other DNA
ccagcaatctatctatccactcatc

SEQ ID NO: 5148 - DNA, 25 bp, synthetic construct
  source 1..25: mol_type = other DNA
tccagcaatctatctatccactcat

SEQ ID NO: 5149 - DNA, 25 bp, synthetic construct
  source 1..25: mol_type = other DNA
atccagcaatctatctatccactca

SEQ ID NO: 5150 - DNA, 25 bp, synthetic construct
  source 1..25: mol_type = other DNA
tatccagcaatctatctatccactc

SEQ ID NO: 5151 - DNA, 25 bp, synthetic construct
  source 1..25: mol_type = other DNA
ctatccagcaatctatctatccact

SEQ ID NO: 5152 - DNA, 25 bp, synthetic construct
  source 1..25: mol_type = other DNA
tctatccagcaatctatctatccac

SEQ ID NO: 5153 - DNA, 25 bp, synthetic construct
  source 1..25: mol_type = other DNA
atctatccagcaatctatctatcca

SEQ ID NO: 5154 - DNA, 25 bp, synthetic construct
  source 1..25: mol_type = other DNA
catctatccagcaatctatctatcc

SEQ ID NO: 5155 - DNA, 25 bp, synthetic construct
  source 1..25: mol_type = other DNA
tcatctatccagcaatctatctatc

SEQ ID NO: 5156 - DNA, 25 bp, synthetic construct
  source 1..25: mol_type = other DNA
atcatctatccagcaatctatctat

SEQ ID NO: 5157 - DNA, 25 bp, synthetic construct
  source 1..25: mol_type = other DNA
aatcatctatccagcaatctatcta

SEQ ID NO: 5158 - DNA, 25 bp, synthetic construct
  source 1..25: mol_type = other DNA
caatcatctatccagcaatctatct

SEQ ID NO: 5159 - DNA, 25 bp, synthetic construct
  source 1..25: mol_type = other DNA
tcaatcatctatccagcaatctatc

SEQ ID NO: 5160 - DNA, 25 bp, synthetic construct
  source 1..25: mol_type = other DNA
gtcaatcatctatccagcaatctat

SEQ ID NO: 5161 - DNA, 25 bp, synthetic construct
  source 1..25: mol_type = other DNA
agtcaatcatctatccagcaatcta

SEQ ID NO: 5162 - DNA, 25 bp, synthetic construct
  source 1..25: mol_type = other DNA
cagtcaatcatctatccagcaatct

SEQ ID NO: 5163 - DNA, 25 bp, synthetic construct
  source 1..25: mol_type = other DNA
ccagtcaatcatctatccagcaatc

SEQ ID NO: 5164 - DNA, 25 bp, synthetic construct
  source 1..25: mol_type = other DNA
cccagtcaatcatctatccagcaat

SEQ ID NO: 5165 - DNA, 25 bp, synthetic construct
  source 1..25: mol_type = other DNA
acccagtcaatcatctatccagcaa

SEQ ID NO: 5166 - DNA, 25 bp, synthetic construct
  source 1..25: mol_type = other DNA
cacccagtcaatcatctatccagca

SEQ ID NO: 5167 - DNA, 25 bp, synthetic construct
  source 1..25: mol_type = other DNA
ccacccagtcaatcatctatccagc

SEQ ID NO: 5168 - DNA, 25 bp, synthetic construct
  source 1..25: mol_type = other DNA
tccacccagtcaatcatctatccag

SEQ ID NO: 5169 - DNA, 25 bp, synthetic construct
  source 1..25: mol_type = other DNA
atccacccagtcaatcatctatcca

SEQ ID NO: 5170 - DNA, 25 bp, synthetic construct
  source 1..25: mol_type = other DNA
tatccacccagtcaatcatctatcc

SEQ ID NO: 5171 - DNA, 25 bp, synthetic construct
  source 1..25: mol_type = other DNA
ctatccacccagtcaatcatctatc

SEQ ID NO: 5172 - DNA, 25 bp, synthetic construct
  source 1..25: mol_type = other DNA
tctatccacccagtcaatcatctat

SEQ ID NO: 5173 - DNA, 25 bp, synthetic construct
  source 1..25: mol_type = other DNA
atctatccacccagtcaatcatcta

SEQ ID NO: 5174 - DNA, 25 bp, synthetic construct
  source 1..25: mol_type = other DNA
catctatccacccagtcaatcatct

SEQ ID NO: 5175 - DNA, 25 bp, synthetic construct
  source 1..25: mol_type = other DNA
tcatctatccacccagtcaatcatc

SEQ ID NO: 5176 - DNA, 25 bp, synthetic construct
  source 1..25: mol_type = other DNA
ttcatctatccacccagtcaatcat

SEQ ID NO: 5177 - DNA, 25 bp, synthetic construct
  source 1..25: mol_type = other DNA
tttcatctatccacccagtcaatca

SEQ ID NO: 5178 - DNA, 25 bp, synthetic construct
  source 1..25: mol_type = other DNA
atttcatctatccacccagtcaatc

SEQ ID NO: 5179 - DNA, 25 bp, synthetic construct
  source 1..25: mol_type = other DNA
catttcatctatccacccagtcaat

SEQ ID NO: 5180 - DNA, 25 bp, synthetic construct
  source 1..25: mol_type = other DNA
acatttcatctatccacccagtcaa

SEQ ID NO: 5181 - DNA, 25 bp, synthetic construct
  source 1..25: mol_type = other DNA
aacatttcatctatccacccagtca

SEQ ID NO: 5182 - DNA, 25 bp, synthetic construct
  source 1..25: mol_type = other DNA
caacatttcatctatccacccagtc

SEQ ID NO: 5183 - DNA, 25 bp, synthetic construct
  source 1..25: mol_type = other DNA
ccaacatttcatctatccacccagt

SEQ ID NO: 5184 - DNA, 25 bp, synthetic construct
  source 1..25: mol_type = other DNA
tccaacatttcatctatccacccag

SEQ ID NO: 5185 - DNA, 25 bp, synthetic construct
  source 1..25: mol_type = other DNA
atccaacatttcatctatccaccca

SEQ ID NO: 5186 - DNA, 25 bp, synthetic construct
  source 1..25: mol_type = other DNA
catccaacatttcatctatccaccc

SEQ ID NO: 5187 - DNA, 25 bp, synthetic construct
  source 1..25: mol_type = other DNA
tcatccaacatttcatctatccacc

SEQ ID NO: 5188 - DNA, 25 bp, synthetic construct
  source 1..25: mol_type = other DNA
ctcatccaacatttcatctatccac

SEQ ID NO: 5189 - DNA, 25 bp, synthetic construct
  source 1..25: mol_type = other DNA
gctcatccaacatttcatctatcca

SEQ ID NO: 5190 - DNA, 25 bp, synthetic construct
  source 1..25: mol_type = other DNA
tgctcatccaacatttcatctatcc

SEQ ID NO: 5191 - DNA, 25 bp, synthetic construct
  source 1..25: mol_type = other DNA
ctgctcatccaacatttcatctatc

SEQ ID NO: 5192 - DNA, 25 bp, synthetic construct
  source 1..25: mol_type = other DNA
tctgctcatccaacatttcatctat

SEQ ID NO: 5193 - DNA, 25 bp, synthetic construct
  source 1..25: mol_type = other DNA
atctgctcatccaacatttcatcta

SEQ ID NO: 5194 - DNA, 25 bp, synthetic construct
  source 1..25: mol_type = other DNA
aatctgctcatccaacatttcatct

SEQ ID NO: 5195 - DNA, 25 bp, synthetic construct
  source 1..25: mol_type = other DNA
taatctgctcatccaacatttcatc

SEQ ID NO: 5196 - DNA, 25 bp, synthetic construct
  source 1..25: mol_type = other DNA
ttaatctgctcatccaacatttcat

SEQ ID NO: 5197 - DNA, 25 bp, synthetic construct
  source 1..25: mol_type = other DNA
cttaatctgctcatccaacatttca

SEQ ID NO: 5198 - DNA, 25 bp, synthetic construct
  source 1..25: mol_type = other DNA
acttaatctgctcatccaacatttc

SEQ ID NO: 5199 - DNA, 25 bp, synthetic construct
  source 1..25: mol_type = other DNA
aacttaatctgctcatccaacattt

SEQ ID NO: 5200 - DNA, 25 bp, synthetic construct
  source 1..25: mol_type = other DNA
caacttaatctgctcatccaacatt

SEQ ID NO: 5201 - DNA, 25 bp, synthetic construct
  source 1..25: mol_type = other DNA
acaacttaatctgctcatccaacat

SEQ ID NO: 5202 - DNA, 25 bp, synthetic construct
  source 1..25: mol_type = other DNA
tacaacttaatctgctcatccaaca

SEQ ID NO: 5203 - DNA, 25 bp, synthetic construct
  source 1..25: mol_type = other DNA
atacaacttaatctgctcatccaac

SEQ ID NO: 5204 - DNA, 25 bp, synthetic construct
  source 1..25: mol_type = other DNA
aatacaacttaatctgctcatccaa

SEQ ID NO: 5205 - DNA, 25 bp, synthetic construct
  source 1..25: mol_type = other DNA
caatacaacttaatctgctcatcca

SEQ ID NO: 5206 - DNA, 25 bp, synthetic construct
  source 1..25: mol_type = other DNA
ccaatacaacttaatctgctcatcc

SEQ ID NO: 5207 - DNA, 25 bp, synthetic construct
  source 1..25: mol_type = other DNA
tccaatacaacttaatctgctcatc

SEQ ID NO: 5208 - DNA, 25 bp, synthetic construct
  source 1..25: mol_type = other DNA
atccaatacaacttaatctgctcat

SEQ ID NO: 5209 - DNA, 25 bp, synthetic construct
  source 1..25: mol_type = other DNA
catccaatacaacttaatctgctca

SEQ ID NO: 5210 - DNA, 25 bp, synthetic construct
  source 1..25: mol_type = other DNA
ccatccaatacaacttaatctgctc

SEQ ID NO: 5211 - DNA, 25 bp, synthetic construct
  source 1..25: mol_type = other DNA
cccatccaatacaacttaatctgct

SEQ ID NO: 5212 - DNA, 25 bp, synthetic construct
  source 1..25: mol_type = other DNA
tcccatccaatacaacttaatctgc

SEQ ID NO: 5213 - DNA, 25 bp, synthetic construct
  source 1..25: mol_type = other DNA
atcccatccaatacaacttaatctg

SEQ ID NO: 5214 - DNA, 25 bp, synthetic construct
  source 1..25: mol_type = other DNA
catcccatccaatacaacttaatct

SEQ ID NO: 5215 - DNA, 25 bp, synthetic construct
  source 1..25: mol_type = other DNA
ccatcccatccaatacaacttaatc

SEQ ID NO: 5216 - DNA, 25 bp, synthetic construct
  source 1..25: mol_type = other DNA
tccatcccatccaatacaacttaat

SEQ ID NO: 5217 - DNA, 25 bp, synthetic construct
  source 1..25: mol_type = other DNA
atccatcccatccaatacaacttaa

SEQ ID NO: 5218 - DNA, 25 bp, synthetic construct
  source 1..25: mol_type = other DNA
catccatcccatccaatacaactta

SEQ ID NO: 5219 - DNA, 25 bp, synthetic construct
  source 1..25: mol_type = other DNA
ccatccatcccatccaatacaactt

SEQ ID NO: 5220 - DNA, 25 bp, synthetic construct
  source 1..25: mol_type = other DNA
tccatccatcccatccaatacaact

SEQ ID NO: 5221 - DNA, 25 bp, synthetic construct
  source 1..25: mol_type = other DNA
ttccatccatcccatccaatacaac

SEQ ID NO: 5222 - DNA, 25 bp, synthetic construct
  source 1..25: mol_type = other DNA
cttccatccatcccatccaatacaa

SEQ ID NO: 5223 - DNA, 25 bp, synthetic construct
  source 1..25: mol_type = other DNA
acttccatccatcccatccaataca

SEQ ID NO: 5224 - DNA, 25 bp, synthetic construct
  source 1..25: mol_type = other DNA
cacttccatccatcccatccaatac

SEQ ID NO: 5225 - DNA, 25 bp, synthetic construct
  source 1..25: mol_type = other DNA
acacttccatccatcccatccaata

SEQ ID NO: 5226 - DNA, 25 bp, synthetic construct
  source 1..25: mol_type = other DNA
cacacttccatccatcccatccaat

SEQ ID NO: 5227 - DNA, 25 bp, synthetic construct
  source 1..25: mol_type = other DNA
ccacacttccatccatcccatccaa

SEQ ID NO: 5228 - DNA, 25 bp, synthetic construct
  source 1..25: mol_type = other DNA
accacacttccatccatcccatcca

SEQ ID NO: 5229 - DNA, 25 bp, synthetic construct
  source 1..25: mol_type = other DNA
aaccacacttccatccatcccatcc

SEQ ID NO: 5230 - DNA, 25 bp, synthetic construct
  source 1..25: mol_type = other DNA
caaccacacttccatccatcccatc

SEQ ID NO: 5231 - DNA, 25 bp, synthetic construct
  source 1..25: mol_type = other DNA
tcaaccacacttccatccatcccat

SEQ ID NO: 5232 - DNA, 25 bp, synthetic construct
  source 1..25: mol_type = other DNA
ctcaaccacacttccatccatccca

SEQ ID NO: 5233 - DNA, 25 bp, synthetic construct
  source 1..25: mol_type = other DNA
actcaaccacacttccatccatccc

SEQ ID NO: 5234 - DNA, 25 bp, synthetic construct
  source 1..25: mol_type = other DNA
aactcaaccacacttccatccatcc

SEQ ID NO: 5235 - DNA, 25 bp, synthetic construct
  source 1..25: mol_type = other DNA
taactcaaccacacttccatccatc

SEQ ID NO: 5236 - DNA, 25 bp, synthetic construct
  source 1..25: mol_type = other DNA
ataactcaaccacacttccatccat

SEQ ID NO: 5237 - DNA, 25 bp, synthetic construct
  source 1..25: mol_type = other DNA
aataactcaaccacacttccatcca

SEQ ID NO: 5238 - DNA, 25 bp, synthetic construct
  source 1..25: mol_type = other DNA
taataactcaaccacacttccatcc

SEQ ID NO: 5239 - DNA, 25 bp, synthetic construct
  source 1..25: mol_type = other DNA
ctaataactcaaccacacttccatc

SEQ ID NO: 5240 - DNA, 25 bp, synthetic construct
  source 1..25: mol_type = other DNA
tctaataactcaaccacacttccat

SEQ ID NO: 5241 - DNA, 25 bp, synthetic construct
  source 1..25: mol_type = other DNA
ttctaataactcaaccacacttcca

SEQ ID NO: 5242 - DNA, 25 bp, synthetic construct
  source 1..25: mol_type = other DNA
cttctaataactcaaccacacttcc

SEQ ID NO: 5243 - DNA, 25 bp, synthetic construct
  source 1..25: mol_type = other DNA
ccttctaataactcaaccacacttc

SEQ ID NO: 5244 - DNA, 25 bp, synthetic construct
  source 1..25: mol_type = other DNA
tccttctaataactcaaccacactt

SEQ ID NO: 5245 - DNA, 25 bp, synthetic construct
  source 1..25: mol_type = other DNA
ttccttctaataactcaaccacact

SEQ ID NO: 5246 - DNA, 25 bp, synthetic construct
  source 1..25: mol_type = other DNA
cttccttctaataactcaaccacac

SEQ ID NO: 5247 - DNA, 25 bp, synthetic construct
  source 1..25: mol_type = other DNA
tcttccttctaataactcaaccaca

SEQ ID NO: 5248 - DNA, 25 bp, synthetic construct
  source 1..25: mol_type = other DNA
atcttccttctaataactcaaccac

SEQ ID NO: 5249 - DNA, 25 bp, synthetic construct
  source 1..25: mol_type = other DNA
aatcttccttctaataactcaacca

SEQ ID NO: 5250 - DNA, 25 bp, synthetic construct
  source 1..25: mol_type = other DNA
caatcttccttctaataactcaacc

SEQ ID NO: 5251 - DNA, 25 bp, synthetic construct
  source 1..25: mol_type = other DNA
tcaatcttccttctaataactcaac

SEQ ID NO: 5252 - DNA, 25 bp, synthetic construct
  source 1..25: mol_type = other DNA
ctcaatcttccttctaataactcaa

SEQ ID NO: 5253 - DNA, 25 bp, synthetic construct
  source 1..25: mol_type = other DNA
actcaatcttccttctaataactca

SEQ ID NO: 5254 - DNA, 25 bp, synthetic construct
  source 1..25: mol_type = other DNA
tactcaatcttccttctaataactc

SEQ ID NO: 5255 - DNA, 25 bp, synthetic construct
  source 1..25: mol_type = other DNA
ctactcaatcttccttctaataact

SEQ ID NO: 5256 - DNA, 25 bp, synthetic construct
  source 1..25: mol_type = other DNA
tctactcaatcttccttctaataac

SEQ ID NO: 5257 - DNA, 25 bp, synthetic construct
  source 1..25: mol_type = other DNA
atctactcaatcttccttctaataa

SEQ ID NO: 5258 - DNA, 25 bp, synthetic construct
  source 1..25: mol_type = other DNA
tatctactcaatcttccttctaata

SEQ ID NO: 5259 - DNA, 25 bp, synthetic construct
  source 1..25: mol_type = other DNA
ctatctactcaatcttccttctaat

SEQ ID NO: 5260 - DNA, 25 bp, synthetic construct
  source 1..25: mol_type = other DNA
cctatctactcaatcttccttctaa

SEQ ID NO: 5261 - DNA, 25 bp, synthetic construct
  source 1..25: mol_type = other DNA
acctatctactcaatcttccttcta

SEQ ID NO: 5262 - DNA, 25 bp, synthetic construct
  source 1..25: mol_type = other DNA
cacctatctactcaatcttccttct

SEQ ID NO: 5263 - DNA, 25 bp, synthetic construct
  source 1..25: mol_type = other DNA
tcacctatctactcaatcttccttc

SEQ ID NO: 5264 - DNA, 25 bp, synthetic construct
  source 1..25: mol_type = other DNA
ttcacctatctactcaatcttcctt

SEQ ID NO: 5265 - DNA, 25 bp, synthetic construct
  source 1..25: mol_type = other DNA
attcacctatctactcaatcttcct

SEQ ID NO: 5266 - DNA, 25 bp, synthetic construct
  source 1..25: mol_type = other DNA
aattcacctatctactcaatcttcc

SEQ ID NO: 5267 - DNA, 25 bp, synthetic construct
  source 1..25: mol_type = other DNA
aaattcacctatctactcaatcttc

SEQ ID NO: 5268 - DNA, 25 bp, synthetic construct
  source 1..25: mol_type = other DNA
caaattcacctatctactcaatctt

SEQ ID NO: 5269 - DNA, 25 bp, synthetic construct
  source 1..25: mol_type = other DNA
acaaattcacctatctactcaatct

SEQ ID NO: 5270 - DNA, 25 bp, synthetic construct
  source 1..25: mol_type = other DNA
aacaaattcacctatctactcaatc

SEQ ID NO: 5271 - DNA, 25 bp, synthetic construct
  source 1..25: mol_type = other DNA
caacaaattcacctatctactcaat

SEQ ID NO: 5272 - DNA, 25 bp, synthetic construct
  source 1..25: mol_type = other DNA
tcaacaaattcacctatctactcaa

SEQ ID NO: 5273 - DNA, 25 bp, synthetic construct
  source 1..25: mol_type = other DNA
atcaacaaattcacctatctactca

SEQ ID NO: 5274 - DNA, 25 bp, synthetic construct
  source 1..25: mol_type = other DNA
tatcaacaaattcacctatctactc

SEQ ID NO: 5275 - DNA, 25 bp, synthetic construct
  source 1..25: mol_type = other DNA
ctatcaacaaattcacctatctact

SEQ ID NO: 5276 - DNA, 25 bp, synthetic construct
  source 1..25: mol_type = other DNA
actatcaacaaattcacctatctac

SEQ ID NO: 5277 - DNA, 25 bp, synthetic construct
  source 1..25: mol_type = other DNA
gactatcaacaaattcacctatcta

SEQ ID NO: 5278 - DNA, 25 bp, synthetic construct
  source 1..25: mol_type = other DNA
tgactatcaacaaattcacctatct

SEQ ID NO: 5279 - DNA, 25 bp, synthetic construct
  source 1..25: mol_type = other DNA
ctgactatcaacaaattcacctatc

SEQ ID NO: 5280 - DNA, 25 bp, synthetic construct
  source 1..25: mol_type = other DNA
tctgactatcaacaaattcacctat

SEQ ID NO: 5281 - DNA, 25 bp, synthetic construct
  source 1..25: mol_type = other DNA
atctgactatcaacaaattcaccta

SEQ ID NO: 5282 - DNA, 25 bp, synthetic construct
  source 1..25: mol_type = other DNA
catctgactatcaacaaattcacct

SEQ ID NO: 5283 - DNA, 25 bp, synthetic construct
  source 1..25: mol_type = other DNA
ccatctgactatcaacaaattcacc

SEQ ID NO: 5284 - DNA, 25 bp, synthetic construct
  source 1..25: mol_type = other DNA
cccatctgactatcaacaaattcac

SEQ ID NO: 5285 - DNA, 25 bp, synthetic construct
  source 1..25: mol_type = other DNA
acccatctgactatcaacaaattca

SEQ ID NO: 5286 - DNA, 25 bp, synthetic construct
  source 1..25: mol_type = other DNA
tacccatctgactatcaacaaattc

SEQ ID NO: 5287 - DNA, 25 bp, synthetic construct
  source 1..25: mol_type = other DNA
ctacccatctgactatcaacaaatt

SEQ ID NO: 5288 - DNA, 25 bp, synthetic construct
  source 1..25: mol_type = other DNA
tctacccatctgactatcaacaaat

SEQ ID NO: 5289 - DNA, 25 bp, synthetic construct
  source 1..25: mol_type = other DNA
atctacccatctgactatcaacaaa

SEQ ID NO: 5290 - DNA, 25 bp, synthetic construct
  source 1..25: mol_type = other DNA
tatctacccatctgactatcaacaa

SEQ ID NO: 5291 - DNA, 25 bp, synthetic construct
  source 1..25: mol_type = other DNA
ctatctacccatctgactatcaaca

SEQ ID NO: 5292 - DNA, 25 bp, synthetic construct
  source 1..25: mol_type = other DNA
cctatctacccatctgactatcaac

SEQ ID NO: 5293 - DNA, 25 bp, synthetic construct
  source 1..25: mol_type = other DNA
acctatctacccatctgactatcaa

SEQ ID NO: 5294 - DNA, 25 bp, synthetic construct
  source 1..25: mol_type = other DNA
tacctatctacccatctgactatca

SEQ ID NO: 5295 - DNA, 25 bp, synthetic construct
  source 1..25: mol_type = other DNA
ctacctatctacccatctgactatc

SEQ ID NO: 5296 - DNA, 25 bp, synthetic construct
  source 1..25: mol_type = other DNA
tctacctatctacccatctgactat

SEQ ID NO: 5297 - DNA, 25 bp, synthetic construct
  source 1..25: mol_type = other DNA
atctacctatctacccatctgacta

SEQ ID NO: 5298 - DNA, 25 bp, synthetic construct
  source 1..25: mol_type = other DNA
catctacctatctacccatctgact

SEQ ID NO: 5299 - DNA, 25 bp, synthetic construct
  source 1..25: mol_type = other DNA
ccatctacctatctacccatctgac

SEQ ID NO: 5300 - DNA, 25 bp, synthetic construct
  source 1..25: mol_type = other DNA
tccatctacctatctacccatctga

SEQ ID NO: 5301 - DNA, 25 bp, synthetic construct
  source 1..25: mol_type = other DNA
atccatctacctatctacccatctg

SEQ ID NO: 5302 - DNA, 25 bp, synthetic construct
  source 1..25: mol_type = other DNA
catccatctacctatctacccatct

SEQ ID NO: 5303 - DNA, 25 bp, synthetic construct
  source 1..25: mol_type = other DNA
ccatccatctacctatctacccatc

SEQ ID NO: 5304 - DNA, 25 bp, synthetic construct
  source 1..25: mol_type = other DNA
tccatccatctacctatctacccat

SEQ ID NO: 5305 - DNA, 25 bp, synthetic construct
  source 1..25: mol_type = other DNA
atccatccatctacctatctaccca

SEQ ID NO: 5306 - DNA, 25 bp, synthetic construct
  source 1..25: mol_type = other DNA
catccatccatctacctatctaccc

SEQ ID NO: 5307 - DNA, 25 bp, synthetic construct
  source 1..25: mol_type = other DNA
ccatccatccatctacctatctacc

SEQ ID NO: 5308 - DNA, 25 bp, synthetic construct
  source 1..25: mol_type = other DNA
tccatccatccatctacctatctac

SEQ ID NO: 5309 - DNA, 25 bp, synthetic construct
  source 1..25: mol_type = other DNA
atccatccatccatctacctatcta

SEQ ID NO: 5310 - DNA, 25 bp, synthetic construct
  source 1..25: mol_type = other DNA
catccatccatccatctacctatct

SEQ ID NO: 5311 - DNA, 25 bp, synthetic construct
  source 1..25: mol_type = other DNA
ccatccatccatccatctacctatc

SEQ ID NO: 5312 - DNA, 25 bp, synthetic construct
  source 1..25: mol_type = other DNA
tccatccatccatccatctacctat

SEQ ID NO: 5313 - DNA, 25 bp, synthetic construct
  source 1..25: mol_type = other DNA
atccatccatccatccatctaccta

SEQ ID NO: 5314 - DNA, 25 bp, synthetic construct
  source 1..25: mol_type = other DNA
catccatccatccatccatctacct

SEQ ID NO: 5315 - DNA, 25 bp, synthetic construct
  source 1..25: mol_type = other DNA
ccatccatccatccatccatctacc

SEQ ID NO: 5316 - DNA, 25 bp, synthetic construct
  source 1..25: mol_type = other DNA
tccatccatccatccatccatctac

SEQ ID NO: 5317 - DNA, 25 bp, synthetic construct
  source 1..25: mol_type = other DNA
atccatccatccatccatccatcta

SEQ ID NO: 5318 - DNA, 25 bp, synthetic construct
  source 1..25: mol_type = other DNA
catccatccatccatccatccatct

SEQ ID NO: 5319 - DNA, 25 bp, synthetic construct
  source 1..25: mol_type = other DNA
acatccatccatccatccatccatc

SEQ ID NO: 5320 - DNA, 25 bp, synthetic construct
  source 1..25: mol_type = other DNA
tacatccatccatccatccatccat

SEQ ID NO: 5321 - DNA, 25 bp, synthetic construct
  source 1..25: mol_type = other DNA
atacatccatccatccatccatcca

SEQ ID NO: 5322 - DNA, 25 bp, synthetic construct
  source 1..25: mol_type = other DNA
tatacatccatccatccatccatcc

SEQ ID NO: 5323 - DNA, 25 bp, synthetic construct
  source 1..25: mol_type = other DNA
ctatacatccatccatccatccatc

SEQ ID NO: 5324 - DNA, 25 bp, synthetic construct
  source 1..25: mol_type = other DNA
cctatacatccatccatccatccat

SEQ ID NO: 5325 - DNA, 25 bp, synthetic construct
  source 1..25: mol_type = other DNA
gcctatacatccatccatccatcca

SEQ ID NO: 5326 - DNA, 25 bp, synthetic construct
  source 1..25: mol_type = other DNA
tgcctatacatccatccatccatcc

SEQ ID NO: 5327 - DNA, 25 bp, synthetic construct
  source 1..25: mol_type = other DNA
ctgcctatacatccatccatccatc

SEQ ID NO: 5328 - DNA, 25 bp, synthetic construct
  source 1..25: mol_type = other DNA
tctgcctatacatccatccatccat

SEQ ID NO: 5329 - DNA, 25 bp, synthetic construct
  source 1..25: mol_type = other DNA
atctgcctatacatccatccatcca

SEQ ID NO: 5330 - DNA, 25 bp, synthetic construct
  source 1..25: mol_type = other DNA
catctgcctatacatccatccatcc

SEQ ID NO: 5331 - DNA, 25 bp, synthetic construct
  source 1..25: mol_type = other DNA
ccatctgcctatacatccatccatc

SEQ ID NO: 5332 - DNA, 25 bp, synthetic construct
  source 1..25: mol_type = other DNA
tccatctgcctatacatccatccat

SEQ ID NO: 5333 - DNA, 25 bp, synthetic construct
  source 1..25: mol_type = other DNA
gtccatctgcctatacatccatcca

SEQ ID NO: 5334 - DNA, 25 bp, synthetic construct
  source 1..25: mol_type = other DNA
tgtccatctgcctatacatccatcc

SEQ ID NO: 5335 - DNA, 25 bp, synthetic construct
  source 1..25: mol_type = other DNA
ttgtccatctgcctatacatccatc

SEQ ID NO: 5336 - DNA, 25 bp, synthetic construct
  source 1..25: mol_type = other DNA
tttgtccatctgcctatacatccat

SEQ ID NO: 5337 - DNA, 25 bp, synthetic construct
  source 1..25: mol_type = other DNA
atttgtccatctgcctatacatcca

SEQ ID NO: 5338 - DNA, 25 bp, synthetic construct
  source 1..25: mol_type = other DNA
catttgtccatctgcctatacatcc

SEQ ID NO: 5339 - DNA, 25 bp, synthetic construct
  source 1..25: mol_type = other DNA
ccatttgtccatctgcctatacatc

SEQ ID NO: 5340 - DNA, 25 bp, synthetic construct
  source 1..25: mol_type = other DNA
tccatttgtccatctgcctatacat

SEQ ID NO: 5341 - DNA, 25 bp, synthetic construct
  source 1..25: mol_type = other DNA
atccatttgtccatctgcctataca

SEQ ID NO: 5342 - DNA, 25 bp, synthetic construct
  source 1..25: mol_type = other DNA
catccatttgtccatctgcctatac

SEQ ID NO: 5343 - DNA, 25 bp, synthetic construct
  source 1..25: mol_type = other DNA
tcatccatttgtccatctgcctata

SEQ ID NO: 5344 - DNA, 25 bp, synthetic construct
  source 1..25: mol_type = other DNA
ttcatccatttgtccatctgcctat

SEQ ID NO: 5345 - DNA, 25 bp, synthetic construct
  source 1..25: mol_type = other DNA
attcatccatttgtccatctgccta

SEQ ID NO: 5346 - DNA, 25 bp, synthetic construct
  source 1..25: mol_type = other DNA
cattcatccatttgtccatctgcct

SEQ ID NO: 5347 - DNA, 25 bp, synthetic construct
  source 1..25: mol_type = other DNA
ccattcatccatttgtccatctgcc

SEQ ID NO: 5348 - DNA, 25 bp, synthetic construct
  source 1..25: mol_type = other DNA
cccattcatccatttgtccatctgc

SEQ ID NO: 5349 - DNA, 25 bp, synthetic construct
  source 1..25: mol_type = other DNA
acccattcatccatttgtccatctg

SEQ ID NO: 5350 - DNA, 25 bp, synthetic construct
  source 1..25: mol_type = other DNA
cacccattcatccatttgtccatct

SEQ ID NO: 5351 - DNA, 25 bp, synthetic construct
  source 1..25: mol_type = other DNA
ccacccattcatccatttgtccatc

SEQ ID NO: 5352 - DNA, 25 bp, synthetic construct
  source 1..25: mol_type = other DNA
cccacccattcatccatttgtccat

SEQ ID NO: 5353 - DNA, 25 bp, synthetic construct
  source 1..25: mol_type = other DNA
acccacccattcatccatttgtcca

SEQ ID NO: 5354 - DNA, 25 bp, synthetic construct
  source 1..25: mol_type = other DNA
cacccacccattcatccatttgtcc

SEQ ID NO: 5355 - DNA, 25 bp, synthetic construct
  source 1..25: mol_type = other DNA
ccacccacccattcatccatttgtc

SEQ ID NO: 5356 - DNA, 25 bp, synthetic construct
  source 1..25: mol_type = other DNA
tccacccacccattcatccatttgt

SEQ ID NO: 5357 - DNA, 25 bp, synthetic construct
  source 1..25: mol_type = other DNA
atccacccacccattcatccatttg

SEQ ID NO: 5358 - DNA, 25 bp, synthetic construct
  source 1..25: mol_type = other DNA
catccacccacccattcatccattt

SEQ ID NO: 5359 - DNA, 25 bp, synthetic construct
  source 1..25: mol_type = other DNA
tcatccacccacccattcatccatt

SEQ ID NO: 5360 - DNA, 25 bp, synthetic construct
  source 1..25: mol_type = other DNA
ttcatccacccacccattcatccat

SEQ ID NO: 5361 - DNA, 25 bp, synthetic construct
  source 1..25: mol_type = other DNA
attcatccacccacccattcatcca

SEQ ID NO: 5362 - DNA, 25 bp, synthetic construct
  source 1..25: mol_type = other DNA
cattcatccacccacccattcatcc

SEQ ID NO: 5363 - DNA, 25 bp, synthetic construct
  source 1..25: mol_type = other DNA
ccattcatccacccacccattcatc

SEQ ID NO: 5364 - DNA, 25 bp, synthetic construct
  source 1..25: mol_type = other DNA
tccattcatccacccacccattcat

SEQ ID NO: 5365 - DNA, 25 bp, synthetic construct
  source 1..25: mol_type = other DNA
ttccattcatccacccacccattca

SEQ ID NO: 5366 - DNA, 25 bp, synthetic construct
  source 1..25: mol_type = other DNA
cttccattcatccacccacccattc

SEQ ID NO: 5367 - DNA, 25 bp, synthetic construct
  source 1..25: mol_type = other DNA
ccttccattcatccacccacccatt

SEQ ID NO: 5368 - DNA, 25 bp, synthetic construct
  source 1..25: mol_type = other DNA
tccttccattcatccacccacccat

SEQ ID NO: 5369 - DNA, 25 bp, synthetic construct
  source 1..25: mol_type = other DNA
atccttccattcatccacccaccca

SEQ ID NO: 5370 - DNA, 25 bp, synthetic construct
  source 1..25: mol_type = other DNA
catccttccattcatccacccaccc

SEQ ID NO: 5371 - DNA, 25 bp, synthetic construct
  source 1..25: mol_type = other DNA
acatccttccattcatccacccacc

SEQ ID NO: 5372 - DNA, 25 bp, synthetic construct
  source 1..25: mol_type = other DNA
cacatccttccattcatccacccac

SEQ ID NO: 5373 - DNA, 25 bp, synthetic construct
  source 1..25: mol_type = other DNA
acacatccttccattcatccaccca

SEQ ID NO: 5374 - DNA, 25 bp, synthetic construct
  source 1..25: mol_type = other DNA
cacacatccttccattcatccaccc

SEQ ID NO: 5375 - DNA, 25 bp, synthetic construct
  source 1..25: mol_type = other DNA
ccacacatccttccattcatccacc

SEQ ID NO: 5376 - DNA, 25 bp, synthetic construct
  source 1..25: mol_type = other DNA
accacacatccttccattcatccac

SEQ ID NO: 5377 - DNA, 25 bp, synthetic construct
  source 1..25: mol_type = other DNA
aaccacacatccttccattcatcca

SEQ ID NO: 5378 - DNA, 25 bp, synthetic construct
  source 1..25: mol_type = other DNA
caaccacacatccttccattcatcc

SEQ ID NO: 5379 - DNA, 25 bp, synthetic construct
  source 1..25: mol_type = other DNA
tcaaccacacatccttccattcatc

SEQ ID NO: 5380 - DNA, 25 bp, synthetic construct
  source 1..25: mol_type = other DNA
ttcaaccacacatccttccattcat

SEQ ID NO: 5381 - DNA, 25 bp, synthetic construct
  source 1..25: mol_type = other DNA
gttcaaccacacatccttccattca

SEQ ID NO: 5382 - DNA, 25 bp, synthetic construct
  source 1..25: mol_type = other DNA
agttcaaccacacatccttccattc

SEQ ID NO: 5383 - DNA, 25 bp, synthetic construct
  source 1..25: mol_type = other DNA
tagttcaaccacacatccttccatt

SEQ ID NO: 5384 - DNA, 25 bp, synthetic construct
  source 1..25: mol_type = other DNA
atagttcaaccacacatccttccat

SEQ ID NO: 5385 - DNA, 25 bp, synthetic construct
  source 1..25: mol_type = other DNA
aatagttcaaccacacatccttcca

SEQ ID NO: 5386 - DNA, 25 bp, synthetic construct
  source 1..25: mol_type = other DNA
caatagttcaaccacacatccttcc

SEQ ID NO: 5387 - DNA, 25 bp, synthetic construct
  source 1..25: mol_type = other DNA
gcaatagttcaaccacacatccttc

SEQ ID NO: 5388 - DNA, 25 bp, synthetic construct
  source 1..25: mol_type = other DNA
tgcaatagttcaaccacacatcctt

SEQ ID NO: 5389 - DNA, 25 bp, synthetic construct
  source 1..25: mol_type = other DNA
ttgcaatagttcaaccacacatcct

SEQ ID NO: 5390 - DNA, 25 bp, synthetic construct
  source 1..25: mol_type = other DNA
cttgcaatagttcaaccacacatcc

SEQ ID NO: 5391 - DNA, 25 bp, synthetic construct
  source 1..25: mol_type = other DNA
acttgcaatagttcaaccacacatc

SEQ ID NO: 5392 - DNA, 25 bp, synthetic construct
  source 1..25: mol_type = other DNA
tacttgcaatagttcaaccacacat

SEQ ID NO: 5393 - DNA, 25 bp, synthetic construct
  source 1..25: mol_type = other DNA
atacttgcaatagttcaaccacaca

SEQ ID NO: 5394 - DNA, 25 bp, synthetic construct
  source 1..25: mol_type = other DNA
aatacttgcaatagttcaaccacac

SEQ ID NO: 5395 - DNA, 25 bp, synthetic construct
  source 1..25: mol_type = other DNA
caatacttgcaatagttcaaccaca

SEQ ID NO: 5396 - DNA, 25 bp, synthetic construct
  source 1..25: mol_type = other DNA
tcaatacttgcaatagttcaaccac

SEQ ID NO: 5397 - DNA, 25 bp, synthetic construct
  source 1..25: mol_type = other DNA
atcaatacttgcaatagttcaacca

SEQ ID NO: 5398 - DNA, 25 bp, synthetic construct
  source 1..25: mol_type = other DNA
tatcaatacttgcaatagttcaacc

SEQ ID NO: 5399 - DNA, 25 bp, synthetic construct
  source 1..25: mol_type = other DNA
ttatcaatacttgcaatagttcaac

SEQ ID NO: 5400 - DNA, 25 bp, synthetic construct
  source 1..25: mol_type = other DNA
attatcaatacttgcaatagttcaa

SEQ ID NO: 5401 - DNA, 25 bp, synthetic construct
  source 1..25: mol_type = other DNA
aattatcaatacttgcaatagttca

SEQ ID NO: 5402 - DNA, 25 bp, synthetic construct
  source 1..25: mol_type = other DNA
caattatcaatacttgcaatagttc

SEQ ID NO: 5403 - DNA, 25 bp, synthetic construct
  source 1..25: mol_type = other DNA
ccaattatcaatacttgcaatagtt

SEQ ID NO: 5404 - DNA, 25 bp, synthetic construct
  source 1..25: mol_type = other DNA
cccaattatcaatacttgcaatagt

SEQ ID NO: 5405 - DNA, 25 bp, synthetic construct
  source 1..25: mol_type = other DNA
acccaattatcaatacttgcaatag

SEQ ID NO: 5406 - DNA, 25 bp, synthetic construct
  source 1..25: mol_type = other DNA
aacccaattatcaatacttgcaata

SEQ ID NO: 5407 - DNA, 25 bp, synthetic construct
  source 1..25: mol_type = other DNA
gaacccaattatcaatacttgcaat

SEQ ID NO: 5408 - DNA, 25 bp, synthetic construct
  source 1..25: mol_type = other DNA
tgaacccaattatcaatacttgcaa

SEQ ID NO: 5409 - DNA, 25 bp, synthetic construct
  source 1..25: mol_type = other DNA
atgaacccaattatcaatacttgca

SEQ ID NO: 5410 - DNA, 25 bp, synthetic construct
  source 1..25: mol_type = other DNA
tatgaacccaattatcaatacttgc

SEQ ID NO: 5411 - DNA, 25 bp, synthetic construct
  source 1..25: mol_type = other DNA
ttatgaacccaattatcaatacttg

SEQ ID NO: 5412 - DNA, 25 bp, synthetic construct
  source 1..25: mol_type = other DNA
attatgaacccaattatcaatactt

SEQ ID NO: 5413 - DNA, 25 bp, synthetic construct
  source 1..25: mol_type = other DNA
aattatgaacccaattatcaatact

SEQ ID NO: 5414 - DNA, 25 bp, synthetic construct
  source 1..25: mol_type = other DNA
aaattatgaacccaattatcaatac

SEQ ID NO: 5415 - DNA, 25 bp, synthetic construct
  source 1..25: mol_type = other DNA
gaaattatgaacccaattatcaata

SEQ ID NO: 5416 - DNA, 25 bp, synthetic construct
  source 1..25: mol_type = other DNA
agaaattatgaacccaattatcaat

SEQ ID NO: 5417 - DNA, 25 bp, synthetic construct
  source 1..25: mol_type = other DNA
cagaaattatgaacccaattatcaa

SEQ ID NO: 5418 - DNA, 25 bp, synthetic construct
  source 1..25: mol_type = other DNA
tcagaaattatgaacccaattatca

SEQ ID NO: 5419 - DNA, 25 bp, synthetic construct
  source 1..25: mol_type = other DNA
ttcagaaattatgaacccaattatc

SEQ ID NO: 5420 - DNA, 25 bp, synthetic construct
  source 1..25: mol_type = other DNA
attcagaaattatgaacccaattat

SEQ ID NO: 5421 - DNA, 25 bp, synthetic construct
  source 1..25: mol_type = other DNA
tattcagaaattatgaacccaatta

SEQ ID NO: 5422 - DNA, 25 bp, synthetic construct
  source 1..25: mol_type = other DNA
atattcagaaattatgaacccaatt

SEQ ID NO: 5423 - DNA, 25 bp, synthetic construct
  source 1..25: mol_type = other DNA
aatattcagaaattatgaacccaat

SEQ ID NO: 5424 - DNA, 25 bp, synthetic construct
  source 1..25: mol_type = other DNA
aaatattcagaaattatgaacccaa

SEQ ID NO: 5425 - DNA, 25 bp, synthetic construct
  source 1..25: mol_type = other DNA
taaatattcagaaattatgaaccca

SEQ ID NO: 5426 - DNA, 25 bp, synthetic construct
  source 1..25: mol_type = other DNA
ctaaatattcagaaattatgaaccc

SEQ ID NO: 5427 - DNA, 25 bp, synthetic construct
  source 1..25: mol_type = other DNA
tctaaatattcagaaattatgaacc

SEQ ID NO: 5428 - DNA, 25 bp, synthetic construct
  source 1..25: mol_type = other DNA
atctaaatattcagaaattatgaac

SEQ ID NO: 5429 - DNA, 25 bp, synthetic construct
  source 1..25: mol_type = other DNA
catctaaatattcagaaattatgaa

SEQ ID NO: 5430 - DNA, 25 bp, synthetic construct
  source 1..25: mol_type = other DNA
ccatctaaatattcagaaattatga

SEQ ID NO: 5431 - DNA, 25 bp, synthetic construct
  source 1..25: mol_type = other DNA
tccatctaaatattcagaaattatg

SEQ ID NO: 5432 - DNA, 25 bp, synthetic construct
  source 1..25: mol_type = other DNA
atccatctaaatattcagaaattat

SEQ ID NO: 5433 - DNA, 25 bp, synthetic construct
  source 1..25: mol_type = other DNA
catccatctaaatattcagaaatta

SEQ ID NO: 5434 - DNA, 25 bp, synthetic construct
  source 1..25: mol_type = other DNA
ccatccatctaaatattcagaaatt

SEQ ID NO: 5435 - DNA, 25 bp, synthetic construct
  source 1..25: mol_type = other DNA
accatccatctaaatattcagaaat

SEQ ID NO: 5436 - DNA, 25 bp, synthetic construct
  source 1..25: mol_type = other DNA
aaccatccatctaaatattcagaaa

SEQ ID NO: 5437 - DNA, 25 bp, synthetic construct
  source 1..25: mol_type = other DNA
caaccatccatctaaatattcagaa

SEQ ID NO: 5438 - DNA, 25 bp, synthetic construct
  source 1..25: mol_type = other DNA
acaaccatccatctaaatattcaga

SEQ ID NO: 5439 - DNA, 25 bp, synthetic construct
  source 1..25: mol_type = other DNA
cacaaccatccatctaaatattcag

SEQ ID NO: 5440 - DNA, 25 bp, synthetic construct
  source 1..25: mol_type = other DNA
tcacaaccatccatctaaatattca

SEQ ID NO: 5441 - DNA, 25 bp, synthetic construct
  source 1..25: mol_type = other DNA
ctcacaaccatccatctaaatattc

SEQ ID NO: 5442 - DNA, 25 bp, synthetic construct
  source 1..25: mol_type = other DNA
actcacaaccatccatctaaatatt

SEQ ID NO: 5443 - DNA, 25 bp, synthetic construct
  source 1..25: mol_type = other DNA
cactcacaaccatccatctaaatat

SEQ ID NO: 5444 - DNA, 25 bp, synthetic construct
  source 1..25: mol_type = other DNA
ccactcacaaccatccatctaaata

SEQ ID NO: 5445 - DNA, 25 bp, synthetic construct
  source 1..25: mol_type = other DNA
gccactcacaaccatccatctaaat

SEQ ID NO: 5446 - DNA, 25 bp, synthetic construct
  source 1..25: mol_type = other DNA
agccactcacaaccatccatctaaa

SEQ ID NO: 5447 - DNA, 25 bp, synthetic construct
  source 1..25: mol_type = other DNA
cagccactcacaaccatccatctaa

SEQ ID NO: 5448 - DNA, 25 bp, synthetic construct
  source 1..25: mol_type = other DNA
ccagccactcacaaccatccatcta

SEQ ID NO: 5449 - DNA, 25 bp, synthetic construct
  source 1..25: mol_type = other DNA
accagccactcacaaccatccatct

SEQ ID NO: 5450 - DNA, 25 bp, synthetic construct
  source 1..25: mol_type = other DNA
caccagccactcacaaccatccatc

SEQ ID NO: 5451 - DNA, 25 bp, synthetic construct
  source 1..25: mol_type = other DNA
ccaccagccactcacaaccatccat

SEQ ID NO: 5452 - DNA, 25 bp, synthetic construct
  source 1..25: mol_type = other DNA
tccaccagccactcacaaccatcca

SEQ ID NO: 5453 - DNA, 25 bp, synthetic construct
  source 1..25: mol_type = other DNA
gtccaccagccactcacaaccatcc

SEQ ID NO: 5454 - DNA, 25 bp, synthetic construct
  source 1..25: mol_type = other DNA
tgtccaccagccactcacaaccatc

SEQ ID NO: 5455 - DNA, 25 bp, synthetic construct
  source 1..25: mol_type = other DNA
ctgtccaccagccactcacaaccat

SEQ ID NO: 5456 - DNA, 25 bp, synthetic construct
  source 1..25: mol_type = other DNA
tctgtccaccagccactcacaacca

SEQ ID NO: 5457 - DNA, 25 bp, synthetic construct
  source 1..25: mol_type = other DNA
gtctgtccaccagccactcacaacc

SEQ ID NO: 5458 - DNA, 25 bp, synthetic construct
  source 1..25: mol_type = other DNA
cgtctgtccaccagccactcacaac

SEQ ID NO: 5459 - DNA, 25 bp, synthetic construct
  source 1..25: mol_type = other DNA
tcgtctgtccaccagccactcacaa

SEQ ID NO: 5460 - DNA, 25 bp, synthetic construct
  source 1..25: mol_type = other DNA
ttcgtctgtccaccagccactcaca

SEQ ID NO: 5461 - DNA, 25 bp, synthetic construct
  source 1..25: mol_type = other DNA
tttcgtctgtccaccagccactcac

SEQ ID NO: 5462 - DNA, 25 bp, synthetic construct
  source 1..25: mol_type = other DNA
ttttcgtctgtccaccagccactca

SEQ ID NO: 5463 - DNA, 25 bp, synthetic construct
  source 1..25: mol_type = other DNA
tttttcgtctgtccaccagccactc

SEQ ID NO: 5464 - DNA, 25 bp, synthetic construct
  source 1..25: mol_type = other DNA
atttttcgtctgtccaccagccact

SEQ ID NO: 5465 - DNA, 25 bp, synthetic construct
  source 1..25: mol_type = other DNA
catttttcgtctgtccaccagccac

SEQ ID NO: 5466 - DNA, 25 bp, synthetic construct
  source 1..25: mol_type = other DNA
ccatttttcgtctgtccaccagcca

SEQ ID NO: 5467 - DNA, 25 bp, synthetic construct
  source 1..25: mol_type = other DNA
tccatttttcgtctgtccaccagcc

SEQ ID NO: 5468 - DNA, 25 bp, synthetic construct
  source 1..25: mol_type = other DNA
atccatttttcgtctgtccaccagc

SEQ ID NO: 5469 - DNA, 25 bp, synthetic construct
  source 1..25: mol_type = other DNA
catccatttttcgtctgtccaccag

SEQ ID NO: 5470 - DNA, 25 bp, synthetic construct
  source 1..25: mol_type = other DNA
ccatccatttttcgtctgtccacca

SEQ ID NO: 5471 - DNA, 25 bp, synthetic construct
  source 1..25: mol_type = other DNA
accatccatttttcgtctgtccacc

SEQ ID NO: 5472 - DNA, 25 bp, synthetic construct
  source 1..25: mol_type = other DNA
aaccatccatttttcgtctgtccac

SEQ ID NO: 5473 - DNA, 25 bp, synthetic construct
  source 1..25: mol_type = other DNA
caaccatccatttttcgtctgtcca

SEQ ID NO: 5474 - DNA, 25 bp, synthetic construct
  source 1..25: mol_type = other DNA
ccaaccatccatttttcgtctgtcc

SEQ ID NO: 5475 - DNA, 25 bp, synthetic construct
  source 1..25: mol_type = other DNA
tccaaccatccatttttcgtctgtc

SEQ ID NO: 5476 - DNA, 25 bp, synthetic construct
  source 1..25: mol_type = other DNA
atccaaccatccatttttcgtctgt

SEQ ID NO: 5477 - DNA, 25 bp, synthetic construct
  source 1..25: mol_type = other DNA
tatccaaccatccatttttcgtctg

SEQ ID NO: 5478 - DNA, 25 bp, synthetic construct
  source 1..25: mol_type = other DNA
ttatccaaccatccatttttcgtct

SEQ ID NO: 5479 - DNA, 25 bp, synthetic construct
  source 1..25: mol_type = other DNA
tttatccaaccatccatttttcgtc

SEQ ID NO: 5480 - DNA, 25 bp, synthetic construct
  source 1..25: mol_type = other DNA
atttatccaaccatccatttttcgt

SEQ ID NO: 5481 - DNA, 25 bp, synthetic construct
  source 1..25: mol_type = other DNA
aatttatccaaccatccatttttcg

SEQ ID NO: 5482 - DNA, 25 bp, synthetic construct
  source 1..25: mol_type = other DNA
caatttatccaaccatccatttttc

SEQ ID NO: 5483 - DNA, 25 bp, synthetic construct
  source 1..25: mol_type = other DNA
tcaatttatccaaccatccattttt

SEQ ID NO: 5484 - DNA, 25 bp, synthetic construct
  source 1..25: mol_type = other DNA
atcaatttatccaaccatccatttt

SEQ ID NO: 5485 - DNA, 25 bp, synthetic construct
  source 1..25: mol_type = other DNA
catcaatttatccaaccatccattt

SEQ ID NO: 5486 - DNA, 25 bp, synthetic construct
  source 1..25: mol_type = other DNA
ccatcaatttatccaaccatccatt

SEQ ID NO: 5487 - DNA, 25 bp, synthetic construct
  source 1..25: mol_type = other DNA
cccatcaatttatccaaccatccat

SEQ ID NO: 5488 - DNA, 25 bp, synthetic construct
  source 1..25: mol_type = other DNA
acccatcaatttatccaaccatcca

SEQ ID NO: 5489 - DNA, 25 bp, synthetic construct
  source 1..25: mol_type = other DNA
cacccatcaatttatccaaccatcc

SEQ ID NO: 5490 - DNA, 25 bp, synthetic construct
  source 1..25: mol_type = other DNA
ccacccatcaatttatccaaccatc

SEQ ID NO: 5491 - DNA, 25 bp, synthetic construct
  source 1..25: mol_type = other DNA
tccacccatcaatttatccaaccat

SEQ ID NO: 5492 - DNA, 25 bp, synthetic construct
  source 1..25: mol_type = other DNA
atccacccatcaatttatccaacca

SEQ ID NO: 5493 - DNA, 25 bp, synthetic construct
  source 1..25: mol_type = other DNA
catccacccatcaatttatccaacc

SEQ ID NO: 5494 - DNA, 25 bp, synthetic construct
  source 1..25: mol_type = other DNA
ccatccacccatcaatttatccaac

SEQ ID NO: 5495 - DNA, 25 bp, synthetic construct
  source 1..25: mol_type = other DNA
tccatccacccatcaatttatccaa

SEQ ID NO: 5496 - DNA, 25 bp, synthetic construct
  source 1..25: mol_type = other DNA
atccatccacccatcaatttatcca

SEQ ID NO: 5497 - DNA, 25 bp, synthetic construct
  source 1..25: mol_type = other DNA
catccatccacccatcaatttatcc

SEQ ID NO: 5498 - DNA, 25 bp, synthetic construct
  source 1..25: mol_type = other DNA
ccatccatccacccatcaatttatc

SEQ ID NO: 5499 - DNA, 25 bp, synthetic construct
  source 1..25: mol_type = other DNA
accatccatccacccatcaatttat

SEQ ID NO: 5500 - DNA, 25 bp, synthetic construct
  source 1..25: mol_type = other DNA
aaccatccatccacccatcaattta

SEQ ID NO: 5501 - DNA, 25 bp, synthetic construct
  source 1..25: mol_type = other DNA
caaccatccatccacccatcaattt

SEQ ID NO: 5502 - DNA, 25 bp, synthetic construct
  source 1..25: mol_type = other DNA
ccaaccatccatccacccatcaatt

SEQ ID NO: 5503 - DNA, 25 bp, synthetic construct
  source 1..25: mol_type = other DNA
accaaccatccatccacccatcaat

SEQ ID NO: 5504 - DNA, 25 bp, synthetic construct
  source 1..25: mol_type = other DNA
aaccaaccatccatccacccatcaa

SEQ ID NO: 5505 - DNA, 25 bp, synthetic construct
  source 1..25: mol_type = other DNA
caaccaaccatccatccacccatca

SEQ ID NO: 5506 - DNA, 25 bp, synthetic construct
  source 1..25: mol_type = other DNA
acaaccaaccatccatccacccatc

SEQ ID NO: 5507 - DNA, 25 bp, synthetic construct
  source 1..25: mol_type = other DNA
tacaaccaaccatccatccacccat

SEQ ID NO: 5508 - DNA, 25 bp, synthetic construct
  source 1..25: mol_type = other DNA
atacaaccaaccatccatccaccca

SEQ ID NO: 5509 - DNA, 25 bp, synthetic construct
  source 1..25: mol_type = other DNA
catacaaccaaccatccatccaccc

SEQ ID NO: 5510 - DNA, 25 bp, synthetic construct
  source 1..25: mol_type = other DNA
tcatacaaccaaccatccatccacc

SEQ ID NO: 5511 - DNA, 25 bp, synthetic construct
  source 1..25: mol_type = other DNA
ttcatacaaccaaccatccatccac

SEQ ID NO: 5512 - DNA, 25 bp, synthetic construct
  source 1..25: mol_type = other DNA
tttcatacaaccaaccatccatcca

SEQ ID NO: 5513 - DNA, 25 bp, synthetic construct
  source 1..25: mol_type = other DNA
ctttcatacaaccaaccatccatcc

SEQ ID NO: 5514 - DNA, 25 bp, synthetic construct
  source 1..25: mol_type = other DNA
tctttcatacaaccaaccatccatc

SEQ ID NO: 5515 - DNA, 25 bp, synthetic construct
  source 1..25: mol_type = other DNA
ttctttcatacaaccaaccatccat

SEQ ID NO: 5516 - DNA, 25 bp, synthetic construct
  source 1..25: mol_type = other DNA
attctttcatacaaccaaccatcca

SEQ ID NO: 5517 - DNA, 25 bp, synthetic construct
  source 1..25: mol_type = other DNA
cattctttcatacaaccaaccatcc

SEQ ID NO: 5518 - DNA, 25 bp, synthetic construct
  source 1..25: mol_type = other DNA
tcattctttcatacaaccaaccatc

SEQ ID NO: 5519 - DNA, 25 bp, synthetic construct
  source 1..25: mol_type = other DNA
ttcattctttcatacaaccaaccat

SEQ ID NO: 5520 - DNA, 25 bp, synthetic construct
  source 1..25: mol_type = other DNA
attcattctttcatacaaccaacca

SEQ ID NO: 5521 - DNA, 25 bp, synthetic construct
  source 1..25: mol_type = other DNA
cattcattctttcatacaaccaacc

SEQ ID NO: 5522 - DNA, 25 bp, synthetic construct
  source 1..25: mol_type = other DNA
tcattcattctttcatacaaccaac

SEQ ID NO: 5523 - DNA, 25 bp, synthetic construct
  source 1..25: mol_type = other DNA
atcattcattctttcatacaaccaa

SEQ ID NO: 5524 - DNA, 25 bp, synthetic construct
  source 1..25: mol_type = other DNA
aatcattcattctttcatacaacca

SEQ ID NO: 5525 - DNA, 25 bp, synthetic construct
  source 1..25: mol_type = other DNA
caatcattcattctttcatacaacc

SEQ ID NO: 5526 - DNA, 25 bp, synthetic construct
  source 1..25: mol_type = other DNA
ccaatcattcattctttcatacaac

SEQ ID NO: 5527 - DNA, 25 bp, synthetic construct
  source 1..25: mol_type = other DNA
cccaatcattcattctttcatacaa

SEQ ID NO: 5528 - DNA, 25 bp, synthetic construct
  source 1..25: mol_type = other DNA
acccaatcattcattctttcataca

SEQ ID NO: 5529 - DNA, 25 bp, synthetic construct
  source 1..25: mol_type = other DNA
tacccaatcattcattctttcatac

SEQ ID NO: 5530 - DNA, 25 bp, synthetic construct
  source 1..25: mol_type = other DNA
ctacccaatcattcattctttcata

SEQ ID NO: 5531 - DNA, 25 bp, synthetic construct
  source 1..25: mol_type = other DNA
cctacccaatcattcattctttcat

SEQ ID NO: 5532 - DNA, 25 bp, synthetic construct
  source 1..25: mol_type = other DNA
acctacccaatcattcattctttca

SEQ ID NO: 5533 - DNA, 25 bp, synthetic construct
  source 1..25: mol_type = other DNA
cacctacccaatcattcattctttc

SEQ ID NO: 5534 - DNA, 25 bp, synthetic construct
  source 1..25: mol_type = other DNA
ccacctacccaatcattcattcttt

SEQ ID NO: 5535 - DNA, 25 bp, synthetic construct
  source 1..25: mol_type = other DNA
tccacctacccaatcattcattctt

SEQ ID NO: 5536 - DNA, 25 bp, synthetic construct
  source 1..25: mol_type = other DNA
atccacctacccaatcattcattct

SEQ ID NO: 5537 - DNA, 25 bp, synthetic construct
  source 1..25: mol_type = other DNA
aatccacctacccaatcattcattc

SEQ ID NO: 5538 - DNA, 25 bp, synthetic construct
  source 1..25: mol_type = other DNA
taatccacctacccaatcattcatt

SEQ ID NO: 5539 - DNA, 25 bp, synthetic construct
  source 1..25: mol_type = other DNA
ttaatccacctacccaatcattcat

SEQ ID NO: 5540 - DNA, 25 bp, synthetic construct
  source 1..25: mol_type = other DNA
cttaatccacctacccaatcattca

SEQ ID NO: 5541 - DNA, 25 bp, synthetic construct
  source 1..25: mol_type = other DNA
acttaatccacctacccaatcattc

SEQ ID NO: 5542 - DNA, 25 bp, synthetic construct
  source 1..25: mol_type = other DNA
aacttaatccacctacccaatcatt

SEQ ID NO: 5543 - DNA, 25 bp, synthetic construct
  source 1..25: mol_type = other DNA
caacttaatccacctacccaatcat

SEQ ID NO: 5544 - DNA, 25 bp, synthetic construct
  source 1..25: mol_type = other DNA
gcaacttaatccacctacccaatca

SEQ ID NO: 5545 - DNA, 25 bp, synthetic construct
  source 1..25: mol_type = other DNA
cgcaacttaatccacctacccaatc

SEQ ID NO: 5546 - DNA, 25 bp, synthetic construct
  source 1..25: mol_type = other DNA
ccgcaacttaatccacctacccaat

SEQ ID NO: 5547 - DNA, 25 bp, synthetic construct
  source 1..25: mol_type = other DNA
tccgcaacttaatccacctacccaa

SEQ ID NO: 5548 - DNA, 25 bp, synthetic construct
  source 1..25: mol_type = other DNA
atccgcaacttaatccacctaccca

SEQ ID NO: 5549 - DNA, 25 bp, synthetic construct
  source 1..25: mol_type = other DNA
gatccgcaacttaatccacctaccc

SEQ ID NO: 5550 - DNA, 25 bp, synthetic construct
  source 1..25: mol_type = other DNA
tgatccgcaacttaatccacctacc

SEQ ID NO: 5551 - DNA, 25 bp, synthetic construct
  source 1..25: mol_type = other DNA
ttgatccgcaacttaatccacctac

SEQ ID NO: 5552 - DNA, 25 bp, synthetic construct
  source 1..25: mol_type = other DNA
attgatccgcaacttaatccaccta

SEQ ID NO: 5553 - DNA, 25 bp, synthetic construct
  source 1..25: mol_type = other DNA
cattgatccgcaacttaatccacct

SEQ ID NO: 5554 - DNA, 25 bp, synthetic construct
  source 1..25: mol_type = other DNA
acattgatccgcaacttaatccacc

SEQ ID NO: 5555 - DNA, 25 bp, synthetic construct
  source 1..25: mol_type = other DNA
tacattgatccgcaacttaatccac

SEQ ID NO: 5556 - DNA, 25 bp, synthetic construct
  source 1..25: mol_type = other DNA
atacattgatccgcaacttaatcca

SEQ ID NO: 5557 - DNA, 25 bp, synthetic construct
  source 1..25: mol_type = other DNA
catacattgatccgcaacttaatcc

SEQ ID NO: 5558 - DNA, 25 bp, synthetic construct
  source 1..25: mol_type = other DNA
ccatacattgatccgcaacttaatc

SEQ ID NO: 5559 - DNA, 25 bp, synthetic construct
  source 1..25: mol_type = other DNA
cccatacattgatccgcaacttaat

SEQ ID NO: 5560 - DNA, 25 bp, synthetic construct
  source 1..25: mol_type = other DNA
tcccatacattgatccgcaacttaa

SEQ ID NO: 5561 - DNA, 25 bp, synthetic construct
  source 1..25: mol_type = other DNA
atcccatacattgatccgcaactta

SEQ ID NO: 5562 - DNA, 25 bp, synthetic construct
  source 1..25: mol_type = other DNA
catcccatacattgatccgcaactt

SEQ ID NO: 5563 - DNA, 25 bp, synthetic construct
  source 1..25: mol_type = other DNA
ccatcccatacattgatccgcaact

SEQ ID NO: 5564 - DNA, 25 bp, synthetic construct
  source 1..25: mol_type = other DNA
tccatcccatacattgatccgcaac

SEQ ID NO: 5565 - DNA, 25 bp, synthetic construct
  source 1..25: mol_type = other DNA
atccatcccatacattgatccgcaa

SEQ ID NO: 5566 - DNA, 25 bp, synthetic construct
  source 1..25: mol_type = other DNA
catccatcccatacattgatccgca

SEQ ID NO: 5567 - DNA, 25 bp, synthetic construct
  source 1..25: mol_type = other DNA
tcatccatcccatacattgatccgc

SEQ ID NO: 5568 - DNA, 25 bp, synthetic construct
  source 1..25: mol_type = other DNA
ttcatccatcccatacattgatccg

SEQ ID NO: 5569 - DNA, 25 bp, synthetic construct
  source 1..25: mol_type = other DNA
attcatccatcccatacattgatcc

SEQ ID NO: 5570 - DNA, 25 bp, synthetic construct
  source 1..25: mol_type = other DNA
cattcatccatcccatacattgatc

SEQ ID NO: 5571 - DNA, 25 bp, synthetic construct
  source 1..25: mol_type = other DNA
ccattcatccatcccatacattgat

SEQ ID NO: 5572 - DNA, 25 bp, synthetic construct
  source 1..25: mol_type = other DNA
tccattcatccatcccatacattga

SEQ ID NO: 5573 - DNA, 25 bp, synthetic construct
  source 1..25: mol_type = other DNA
atccattcatccatcccatacattg

SEQ ID NO: 5574 - DNA, 25 bp, synthetic construct
  source 1..25: mol_type = other DNA
catccattcatccatcccatacatt

SEQ ID NO: 5575 - DNA, 25 bp, synthetic construct
  source 1..25: mol_type = other DNA
ccatccattcatccatcccatacat

SEQ ID NO: 5576 - DNA, 25 bp, synthetic construct
  source 1..25: mol_type = other DNA
tccatccattcatccatcccataca

SEQ ID NO: 5577 - DNA, 25 bp, synthetic construct
  source 1..25: mol_type = other DNA
atccatccattcatccatcccatac

SEQ ID NO: 5578 - DNA, 25 bp, synthetic construct
  source 1..25: mol_type = other DNA
catccatccattcatccatcccata

SEQ ID NO: 5579 - DNA, 25 bp, synthetic construct
  source 1..25: mol_type = other DNA
ccatccatccattcatccatcccat

SEQ ID NO: 5580 - DNA, 25 bp, synthetic construct
  source 1..25: mol_type = other DNA
tccatccatccattcatccatccca

SEQ ID NO: 5581 - DNA, 25 bp, synthetic construct
  source 1..25: mol_type = other DNA
atccatccatccattcatccatccc

SEQ ID NO: 5582 - DNA, 25 bp, synthetic construct
  source 1..25: mol_type = other DNA
catccatccatccattcatccatcc

SEQ ID NO: 5583 - DNA, 25 bp, synthetic construct
  source 1..25: mol_type = other DNA
ccatccatccatccattcatccatc

SEQ ID NO: 5584 - DNA, 25 bp, synthetic construct
  source 1..25: mol_type = other DNA
tccatccatccatccattcatccat

SEQ ID NO: 5585 - DNA, 25 bp, synthetic construct
  source 1..25: mol_type = other DNA
atccatccatccatccattcatcca

SEQ ID NO: 5586 - DNA, 25 bp, synthetic construct
  source 1..25: mol_type = other DNA
catccatccatccatccattcatcc

SEQ ID NO: 5587 - DNA, 25 bp, synthetic construct
  source 1..25: mol_type = other DNA
acatccatccatccatccattcatc

SEQ ID NO: 5588 - DNA, 25 bp, synthetic construct
  source 1..25: mol_type = other DNA
cacatccatccatccatccattcat

SEQ ID NO: 5589 - DNA, 25 bp, synthetic construct
  source 1..25: mol_type = other DNA
acacatccatccatccatccattca

SEQ ID NO: 5590 - DNA, 25 bp, synthetic construct
  source 1..25: mol_type = other DNA
cacacatccatccatccatccattc

SEQ ID NO: 5591 - DNA, 25 bp, synthetic construct
  source 1..25: mol_type = other DNA
ccacacatccatccatccatccatt

SEQ ID NO: 5592 - DNA, 25 bp, synthetic construct
  source 1..25: mol_type = other DNA
accacacatccatccatccatccat

SEQ ID NO: 5593 - DNA, 25 bp, synthetic construct
  source 1..25: mol_type = other DNA
aaccacacatccatccatccatcca

SEQ ID NO: 5594 - DNA, 25 bp, synthetic construct
  source 1..25: mol_type = other DNA
caaccacacatccatccatccatcc

SEQ ID NO: 5595 - DNA, 25 bp, synthetic construct
  source 1..25: mol_type = other DNA
tcaaccacacatccatccatccatc

SEQ ID NO: 5596 - DNA, 25 bp, synthetic construct
  source 1..25: mol_type = other DNA
ttcaaccacacatccatccatccat

SEQ ID NO: 5597 - DNA, 25 bp, synthetic construct
  source 1..25: mol_type = other DNA
attcaaccacacatccatccatcca

SEQ ID NO: 5598 - DNA, 25 bp, synthetic construct
  source 1..25: mol_type = other DNA
aattcaaccacacatccatccatcc

SEQ ID NO: 5599 - DNA, 25 bp, synthetic construct
  source 1..25: mol_type = other DNA
taattcaaccacacatccatccatc

SEQ ID NO: 5600 - DNA, 25 bp, synthetic construct
  source 1..25: mol_type = other DNA
gtaattcaaccacacatccatccat

SEQ ID NO: 5601 - DNA, 25 bp, synthetic construct
  source 1..25: mol_type = other DNA
agtaattcaaccacacatccatcca

SEQ ID NO: 5602 - DNA, 25 bp, synthetic construct
  source 1..25: mol_type = other DNA
cagtaattcaaccacacatccatcc

SEQ ID NO: 5603 - DNA, 25 bp, synthetic construct
  source 1..25: mol_type = other DNA
tcagtaattcaaccacacatccatc

SEQ ID NO: 5604 - DNA, 25 bp, synthetic construct
  source 1..25: mol_type = other DNA
ttcagtaattcaaccacacatccat

SEQ ID NO: 5605 - DNA, 25 bp, synthetic construct
  source 1..25: mol_type = other DNA
tttcagtaattcaaccacacatcca

SEQ ID NO: 5606 - DNA, 25 bp, synthetic construct
  source 1..25: mol_type = other DNA
ctttcagtaattcaaccacacatcc

SEQ ID NO: 5607 - DNA, 25 bp, synthetic construct
  source 1..25: mol_type = other DNA
cctttcagtaattcaaccacacatc

SEQ ID NO: 5608 - DNA, 25 bp, synthetic construct
  source 1..25: mol_type = other DNA
acctttcagtaattcaaccacacat

SEQ ID NO: 5609 - DNA, 25 bp, synthetic construct
  source 1..25: mol_type = other DNA
aacctttcagtaattcaaccacaca

SEQ ID NO: 5610 - DNA, 25 bp, synthetic construct
  source 1..25: mol_type = other DNA
caacctttcagtaattcaaccacac

SEQ ID NO: 5611 - DNA, 25 bp, synthetic construct
  source 1..25: mol_type = other DNA
ccaacctttcagtaattcaaccaca

SEQ ID NO: 5612 - DNA, 25 bp, synthetic construct
  source 1..25: mol_type = other DNA
tccaacctttcagtaattcaaccac

SEQ ID NO: 5613 - DNA, 25 bp, synthetic construct
  source 1..25: mol_type = other DNA
ttccaacctttcagtaattcaacca

SEQ ID NO: 5614 - DNA, 25 bp, synthetic construct
  source 1..25: mol_type = other DNA
cttccaacctttcagtaattcaacc

SEQ ID NO: 5615 - DNA, 25 bp, synthetic construct
  source 1..25: mol_type = other DNA
tcttccaacctttcagtaattcaac

SEQ ID NO: 5616 - DNA, 25 bp, synthetic construct
  source 1..25: mol_type = other DNA
ctcttccaacctttcagtaattcaa

SEQ ID NO: 5617 - DNA, 25 bp, synthetic construct
  source 1..25: mol_type = other DNA
actcttccaacctttcagtaattca

SEQ ID NO: 5618 - DNA, 25 bp, synthetic construct
  source 1..25: mol_type = other DNA
cactcttccaacctttcagtaattc

SEQ ID NO: 5619 - DNA, 25 bp, synthetic construct
  source 1..25: mol_type = other DNA
ccactcttccaacctttcagtaatt

SEQ ID NO: 5620 - DNA, 25 bp, synthetic construct
  source 1..25: mol_type = other DNA
tccactcttccaacctttcagtaat

SEQ ID NO: 5621 - DNA, 25 bp, synthetic construct
  source 1..25: mol_type = other DNA
atccactcttccaacctttcagtaa

SEQ ID NO: 5622 - DNA, 25 bp, synthetic construct
  source 1..25: mol_type = other DNA
catccactcttccaacctttcagta

SEQ ID NO: 5623 - DNA, 25 bp, synthetic construct
  source 1..25: mol_type = other DNA
ccatccactcttccaacctttcagt

SEQ ID NO: 5624 - DNA, 25 bp, synthetic construct
  source 1..25: mol_type = other DNA
cccatccactcttccaacctttcag

SEQ ID NO: 5625 - DNA, 25 bp, synthetic construct
  source 1..25: mol_type = other DNA
acccatccactcttccaacctttca

SEQ ID NO: 5626 - DNA, 25 bp, synthetic construct
  source 1..25: mol_type = other DNA
cacccatccactcttccaacctttc

SEQ ID NO: 5627 - DNA, 25 bp, synthetic construct
  source 1..25: mol_type = other DNA
tcacccatccactcttccaaccttt

SEQ ID NO: 5628 - DNA, 25 bp, synthetic construct
  source 1..25: mol_type = other DNA
ttcacccatccactcttccaacctt

SEQ ID NO: 5629 - DNA, 25 bp, synthetic construct
  source 1..25: mol_type = other DNA
tttcacccatccactcttccaacct

SEQ ID NO: 5630 - DNA, 25 bp, synthetic construct
  source 1..25: mol_type = other DNA
atttcacccatccactcttccaacc

SEQ ID NO: 5631 - DNA, 25 bp, synthetic construct
  source 1..25: mol_type = other DNA
aatttcacccatccactcttccaac

SEQ ID NO: 5632 - DNA, 25 bp, synthetic construct
  source 1..25: mol_type = other DNA
aaatttcacccatccactcttccaa

SEQ ID NO: 5633 - DNA, 25 bp, synthetic construct
  source 1..25: mol_type = other DNA
caaatttcacccatccactcttcca

SEQ ID NO: 5634 - DNA, 25 bp, synthetic construct
  source 1..25: mol_type = other DNA
ccaaatttcacccatccactcttcc

SEQ ID NO: 5635 - DNA, 25 bp, synthetic construct
  source 1..25: mol_type = other DNA
cccaaatttcacccatccactcttc

SEQ ID NO: 5636 - DNA, 25 bp, synthetic construct
  source 1..25: mol_type = other DNA
ccccaaatttcacccatccactctt

SEQ ID NO: 5637 - DNA, 25 bp, synthetic construct
  source 1..25: mol_type = other DNA
accccaaatttcacccatccactct

SEQ ID NO: 5638 - DNA, 25 bp, synthetic construct
  source 1..25: mol_type = other DNA
taccccaaatttcacccatccactc

SEQ ID NO: 5639 - DNA, 25 bp, synthetic construct
  source 1..25: mol_type = other DNA
ctaccccaaatttcacccatccact

SEQ ID NO: 5640 - DNA, 25 bp, synthetic construct
  source 1..25: mol_type = other DNA
actaccccaaatttcacccatccac

SEQ ID NO: 5641 - DNA, 25 bp, synthetic construct
  source 1..25: mol_type = other DNA
aactaccccaaatttcacccatcca

SEQ ID NO: 5642 - DNA, 25 bp, synthetic construct
  source 1..25: mol_type = other DNA
taactaccccaaatttcacccatcc

SEQ ID NO: 5643 - DNA, 25 bp, synthetic construct
  source 1..25: mol_type = other DNA
ctaactaccccaaatttcacccatc

SEQ ID NO: 5644 - DNA, 25 bp, synthetic construct
  source 1..25: mol_type = other DNA
tctaactaccccaaatttcacccat

SEQ ID NO: 5645 - DNA, 25 bp, synthetic construct
  source 1..25: mol_type = other DNA
atctaactaccccaaatttcaccca

SEQ ID NO: 5646 - DNA, 25 bp, synthetic construct
  source 1..25: mol_type = other DNA
catctaactaccccaaatttcaccc

SEQ ID NO: 5647 - DNA, 25 bp, synthetic construct
  source 1..25: mol_type = other DNA
ccatctaactaccccaaatttcacc

SEQ ID NO: 5648 - DNA, 25 bp, synthetic construct
  source 1..25: mol_type = other DNA
cccatctaactaccccaaatttcac

SEQ ID NO: 5649 - DNA, 25 bp, synthetic construct
  source 1..25: mol_type = other DNA
acccatctaactaccccaaatttca

SEQ ID NO: 5650 - DNA, 25 bp, synthetic construct
  source 1..25: mol_type = other DNA
cacccatctaactaccccaaatttc

SEQ ID NO: 5651 - DNA, 25 bp, synthetic construct
  source 1..25: mol_type = other DNA
ccacccatctaactaccccaaattt

SEQ ID NO: 5652 - DNA, 25 bp, synthetic construct
  source 1..25: mol_type = other DNA
cccacccatctaactaccccaaatt

SEQ ID NO: 5653 - DNA, 25 bp, synthetic construct
  source 1..25: mol_type = other DNA
acccacccatctaactaccccaaat

SEQ ID NO: 5654 - DNA, 25 bp, synthetic construct
  source 1..25: mol_type = other DNA
cacccacccatctaactaccccaaa

SEQ ID NO: 5655 - DNA, 25 bp, synthetic construct
  source 1..25: mol_type = other DNA
acacccacccatctaactaccccaa

SEQ ID NO: 5656 - DNA, 25 bp, synthetic construct
  source 1..25: mol_type = other DNA
cacacccacccatctaactacccca

SEQ ID NO: 5657 - DNA, 25 bp, synthetic construct
  source 1..25: mol_type = other DNA
acacacccacccatctaactacccc

SEQ ID NO: 5658 - DNA, 25 bp, synthetic construct
  source 1..25: mol_type = other DNA
cacacacccacccatctaactaccc

SEQ ID NO: 5659 - DNA, 25 bp, synthetic construct
  source 1..25: mol_type = other DNA
ccacacacccacccatctaactacc

SEQ ID NO: 5660 - DNA, 25 bp, synthetic construct
  source 1..25: mol_type = other DNA
tccacacacccacccatctaactac

SEQ ID NO: 5661 - DNA, 25 bp, synthetic construct
  source 1..25: mol_type = other DNA
atccacacacccacccatctaacta

SEQ ID NO: 5662 - DNA, 25 bp, synthetic construct
  source 1..25: mol_type = other DNA
catccacacacccacccatctaact

SEQ ID NO: 5663 - DNA, 25 bp, synthetic construct
  source 1..25: mol_type = other DNA
ccatccacacacccacccatctaac

SEQ ID NO: 5664 - DNA, 25 bp, synthetic construct
  source 1..25: mol_type = other DNA
tccatccacacacccacccatctaa

SEQ ID NO: 5665 - DNA, 25 bp, synthetic construct
  source 1..25: mol_type = other DNA
atccatccacacacccacccatcta

SEQ ID NO: 5666 - DNA, 25 bp, synthetic construct
  source 1..25: mol_type = other DNA
tatccatccacacacccacccatct

SEQ ID NO: 5667 - DNA, 25 bp, synthetic construct
  source 1..25: mol_type = other DNA
ttatccatccacacacccacccatc

SEQ ID NO: 5668 - DNA, 25 bp, synthetic construct
  source 1..25: mol_type = other DNA
tttatccatccacacacccacccat

SEQ ID NO: 5669 - DNA, 25 bp, synthetic construct
  source 1..25: mol_type = other DNA
ttttatccatccacacacccaccca

SEQ ID NO: 5670 - DNA, 25 bp, synthetic construct
  source 1..25: mol_type = other DNA
cttttatccatccacacacccaccc

SEQ ID NO: 5671 - DNA, 25 bp, synthetic construct
  source 1..25: mol_type = other DNA
tcttttatccatccacacacccacc

SEQ ID NO: 5672 - DNA, 25 bp, synthetic construct
  source 1..25: mol_type = other DNA
ctcttttatccatccacacacccac

SEQ ID NO: 5673 - DNA, 25 bp, synthetic construct
  source 1..25: mol_type = other DNA
actcttttatccatccacacaccca

SEQ ID NO: 5674 - DNA, 25 bp, synthetic construct
  source 1..25: mol_type = other DNA
tactcttttatccatccacacaccc

SEQ ID NO: 5675 - DNA, 25 bp, synthetic construct
  source 1..25: mol_type = other DNA
ctactcttttatccatccacacacc

SEQ ID NO: 5676 - DNA, 25 bp, synthetic construct
  source 1..25: mol_type = other DNA
tctactcttttatccatccacacac

SEQ ID NO: 5677 - DNA, 25 bp, synthetic construct
  source 1..25: mol_type = other DNA
atctactcttttatccatccacaca

SEQ ID NO: 5678 - DNA, 25 bp, synthetic construct
  source 1..25: mol_type = other DNA
catctactcttttatccatccacac

SEQ ID NO: 5679 - DNA, 25 bp, synthetic construct
  source 1..25: mol_type = other DNA
tcatctactcttttatccatccaca

SEQ ID NO: 5680 - DNA, 25 bp, synthetic construct
  source 1..25: mol_type = other DNA
ttcatctactcttttatccatccac

SEQ ID NO: 5681 - DNA, 25 bp, synthetic construct
  source 1..25: mol_type = other DNA
attcatctactcttttatccatcca

SEQ ID NO: 5682 - DNA, 25 bp, synthetic construct
  source 1..25: mol_type = other DNA
cattcatctactcttttatccatcc

SEQ ID NO: 5683 - DNA, 25 bp, synthetic construct
  source 1..25: mol_type = other DNA
tcattcatctactcttttatccatc

SEQ ID NO: 5684 - DNA, 25 bp, synthetic construct
  source 1..25: mol_type = other DNA
ttcattcatctactcttttatccat

SEQ ID NO: 5685 - DNA, 25 bp, synthetic construct
  source 1..25: mol_type = other DNA
attcattcatctactcttttatcca

SEQ ID NO: 5686 - DNA, 25 bp, synthetic construct
  source 1..25: mol_type = other DNA
aattcattcatctactcttttatcc

SEQ ID NO: 5687 - DNA, 25 bp, synthetic construct
  source 1..25: mol_type = other DNA
taattcattcatctactcttttatc

SEQ ID NO: 5688 - DNA, 25 bp, synthetic construct
  source 1..25: mol_type = other DNA
ttaattcattcatctactcttttat

SEQ ID NO: 5689 - DNA, 25 bp, synthetic construct
  source 1..25: mol_type = other DNA
attaattcattcatctactctttta

SEQ ID NO: 5690 - DNA, 25 bp, synthetic construct
  source 1..25: mol_type = other DNA
cattaattcattcatctactctttt

SEQ ID NO: 5691 - DNA, 25 bp, synthetic construct
  source 1..25: mol_type = other DNA
tcattaattcattcatctactcttt

SEQ ID NO: 5692 - DNA, 25 bp, synthetic construct
  source 1..25: mol_type = other DNA
ttcattaattcattcatctactctt

SEQ ID NO: 5693 - DNA, 25 bp, synthetic construct
  source 1..25: mol_type = other DNA
attcattaattcattcatctactct

SEQ ID NO: 5694 - DNA, 25 bp, synthetic construct
  source 1..25: mol_type = other DNA
tattcattaattcattcatctactc

SEQ ID NO: 5695 - DNA, 25 bp, synthetic construct
  source 1..25: mol_type = other DNA
ttattcattaattcattcatctact

SEQ ID NO: 5696 - DNA, 25 bp, synthetic construct
  source 1..25: mol_type = other DNA
tttattcattaattcattcatctac

SEQ ID NO: 5697 - DNA, 25 bp, synthetic construct
  source 1..25: mol_type = other DNA
gtttattcattaattcattcatcta

SEQ ID NO: 5698 - DNA, 25 bp, synthetic construct
  source 1..25: mol_type = other DNA
tgtttattcattaattcattcatct

SEQ ID NO: 5699 - DNA, 25 bp, synthetic construct
  source 1..25: mol_type = other DNA
ctgtttattcattaattcattcatc

SEQ ID NO: 5700 - DNA, 25 bp, synthetic construct
  source 1..25: mol_type = other DNA
cctgtttattcattaattcattcat

SEQ ID NO: 5701 - DNA, 25 bp, synthetic construct
  source 1..25: mol_type = other DNA
gcctgtttattcattaattcattca

SEQ ID NO: 5702 - DNA, 25 bp, synthetic construct
  source 1..25: mol_type = other DNA
tgcctgtttattcattaattcattc

SEQ ID NO: 5703 - DNA, 25 bp, synthetic construct
  source 1..25: mol_type = other DNA
ctgcctgtttattcattaattcatt

SEQ ID NO: 5704 - DNA, 25 bp, synthetic construct
  source 1..25: mol_type = other DNA
tctgcctgtttattcattaattcat

SEQ ID NO: 5705 - DNA, 25 bp, synthetic construct
  source 1..25: mol_type = other DNA
atctgcctgtttattcattaattca

SEQ ID NO: 5706 - DNA, 25 bp, synthetic construct
  source 1..25: mol_type = other DNA
catctgcctgtttattcattaattc

SEQ ID NO: 5707 - DNA, 25 bp, synthetic construct
  source 1..25: mol_type = other DNA
ccatctgcctgtttattcattaatt

SEQ ID NO: 5708 - DNA, 25 bp, synthetic construct
  source 1..25: mol_type = other DNA
tccatctgcctgtttattcattaat

SEQ ID NO: 5709 - DNA, 25 bp, synthetic construct
  source 1..25: mol_type = other DNA
atccatctgcctgtttattcattaa

SEQ ID NO: 5710 - DNA, 25 bp, synthetic construct
  source 1..25: mol_type = other DNA
catccatctgcctgtttattcatta

SEQ ID NO: 5711 - DNA, 25 bp, synthetic construct
  source 1..25: mol_type = other DNA
tcatccatctgcctgtttattcatt

SEQ ID NO: 5712 - DNA, 25 bp, synthetic construct
  source 1..25: mol_type = other DNA
atcatccatctgcctgtttattcat

SEQ ID NO: 5713 - DNA, 25 bp, synthetic construct
  source 1..25: mol_type = other DNA
catcatccatctgcctgtttattca

SEQ ID NO: 5714 - DNA, 25 bp, synthetic construct
  source 1..25: mol_type = other DNA
acatcatccatctgcctgtttattc

SEQ ID NO: 5715 - DNA, 25 bp, synthetic construct
  source 1..25: mol_type = other DNA
tacatcatccatctgcctgtttatt

SEQ ID NO: 5716 - DNA, 25 bp, synthetic construct
  source 1..25: mol_type = other DNA
ttacatcatccatctgcctgtttat

SEQ ID NO: 5717 - DNA, 25 bp, synthetic construct
  source 1..25: mol_type = other DNA
cttacatcatccatctgcctgttta

SEQ ID NO: 5718 - DNA, 25 bp, synthetic construct
  source 1..25: mol_type = other DNA
gcttacatcatccatctgcctgttt

SEQ ID NO: 5719 - DNA, 25 bp, synthetic construct
  source 1..25: mol_type = other DNA
agcttacatcatccatctgcctgtt

SEQ ID NO: 5720 - DNA, 25 bp, synthetic construct
  source 1..25: mol_type = other DNA
cagcttacatcatccatctgcctgt

SEQ ID NO: 5721 - DNA, 25 bp, synthetic construct
  source 1..25: mol_type = other DNA
gcagcttacatcatccatctgcctg

SEQ ID NO: 5722 - DNA, 25 bp, synthetic construct
  source 1..25: mol_type = other DNA
ggcagcttacatcatccatctgcct

SEQ ID NO: 5723 - DNA, 25 bp, synthetic construct
  source 1..25: mol_type = other DNA
gggcagcttacatcatccatctgcc

SEQ ID NO: 5724 - DNA, 25 bp, synthetic construct
  source 1..25: mol_type = other DNA
ggggcagcttacatcatccatctgc

SEQ ID NO: 5725 - DNA, 25 bp, synthetic construct
  source 1..25: mol_type = other DNA
tggggcagcttacatcatccatctg

SEQ ID NO: 5726 - DNA, 25 bp, synthetic construct
  source 1..25: mol_type = other DNA
ctggggcagcttacatcatccatct

SEQ ID NO: 5727 - DNA, 25 bp, synthetic construct
  source 1..25: mol_type = other DNA
tctggggcagcttacatcatccatc

SEQ ID NO: 5728 - DNA, 25 bp, synthetic construct
  source 1..25: mol_type = other DNA
gtctggggcagcttacatcatccat

SEQ ID NO: 5729 - DNA, 25 bp, synthetic construct
  source 1..25: mol_type = other DNA
ggtctggggcagcttacatcatcca

SEQ ID NO: 5730 - DNA, 25 bp, synthetic construct
  source 1..25: mol_type = other DNA
gggtctggggcagcttacatcatcc

SEQ ID NO: 5731 - DNA, 25 bp, synthetic construct
  source 1..25: mol_type = other DNA
agggtctggggcagcttacatcatc

SEQ ID NO: 5732 - DNA, 25 bp, synthetic construct
  source 1..25: mol_type = other DNA
cagggtctggggcagcttacatcat

SEQ ID NO: 5733 - DNA, 25 bp, synthetic construct
  source 1..25: mol_type = other DNA
ccagggtctggggcagcttacatca

SEQ ID NO: 5734 - DNA, 25 bp, synthetic construct
  source 1..25: mol_type = other DNA
cccagggtctggggcagcttacatc

SEQ ID NO: 5735 - DNA, 25 bp, synthetic construct
  source 1..25: mol_type = other DNA
tcccagggtctggggcagcttacat

SEQ ID NO: 5736 - DNA, 25 bp, synthetic construct
  source 1..25: mol_type = other DNA
gtcccagggtctggggcagcttaca

SEQ ID NO: 5737 - DNA, 25 bp, synthetic construct
  source 1..25: mol_type = other DNA
ggtcccagggtctggggcagcttac

SEQ ID NO: 5738 - DNA, 25 bp, synthetic construct
  source 1..25: mol_type = other DNA
aggtcccagggtctggggcagctta

SEQ ID NO: 5739 - DNA, 25 bp, synthetic construct
  source 1..25: mol_type = other DNA
gaggtcccagggtctggggcagctt

SEQ ID NO: 5740 - DNA, 25 bp, synthetic construct
  source 1..25: mol_type = other DNA
agaggtcccagggtctggggcagct

SEQ ID NO: 5741 - DNA, 25 bp, synthetic construct
  source 1..25: mol_type = other DNA
cagaggtcccagggtctggggcagc

SEQ ID NO: 5742 - DNA, 25 bp, synthetic construct
  source 1..25: mol_type = other DNA
tcagaggtcccagggtctggggcag

SEQ ID NO: 5743 - DNA, 25 bp, synthetic construct
  source 1..25: mol_type = other DNA
gtcagaggtcccagggtctggggca

SEQ ID NO: 5744 - DNA, 25 bp, synthetic construct
  source 1..25: mol_type = other DNA
ggtcagaggtcccagggtctggggc

SEQ ID NO: 5745 - DNA, 25 bp, synthetic construct
  source 1..25: mol_type = other DNA
gggtcagaggtcccagggtctgggg

SEQ ID NO: 5746 - DNA, 25 bp, synthetic construct
  source 1..25: mol_type = other DNA
ggggtcagaggtcccagggtctggg

SEQ ID NO: 5747 - DNA, 25 bp, synthetic construct
  source 1..25: mol_type = other DNA
gggggtcagaggtcccagggtctgg

SEQ ID NO: 5748 - DNA, 25 bp, synthetic construct
  source 1..25: mol_type = other DNA
cgggggtcagaggtcccagggtctg

SEQ ID NO: 5749 - DNA, 25 bp, synthetic construct
  source 1..25: mol_type = other DNA
ccgggggtcagaggtcccagggtct

SEQ ID NO: 5750 - DNA, 25 bp, synthetic construct
  source 1..25: mol_type = other DNA
gccgggggtcagaggtcccagggtc

SEQ ID NO: 5751 - DNA, 25 bp, synthetic construct
  source 1..25: mol_type = other DNA
cgccgggggtcagaggtcccagggt

SEQ ID NO: 5752 - DNA, 25 bp, synthetic construct
  source 1..25: mol_type = other DNA
tcgccgggggtcagaggtcccaggg

SEQ ID NO: 5753 - DNA, 25 bp, synthetic construct
  source 1..25: mol_type = other DNA
gtcgccgggggtcagaggtcccagg

SEQ ID NO: 5754 - DNA, 25 bp, synthetic construct
  source 1..25: mol_type = other DNA
ggtcgccgggggtcagaggtcccag

SEQ ID NO: 5755 - DNA, 25 bp, synthetic construct
  source 1..25: mol_type = other DNA
gggtcgccgggggtcagaggtccca

SEQ ID NO: 5756 - DNA, 25 bp, synthetic construct
  source 1..25: mol_type = other DNA
ggggtcgccgggggtcagaggtccc

SEQ ID NO: 5757 - DNA, 25 bp, synthetic construct
  source 1..25: mol_type = other DNA
aggggtcgccgggggtcagaggtcc

SEQ ID NO: 5758 - DNA, 25 bp, synthetic construct
  source 1..25: mol_type = other DNA
aaggggtcgccgggggtcagaggtc

SEQ ID NO: 5759 - DNA, 25 bp, synthetic construct
  source 1..25: mol_type = other DNA
caaggggtcgccgggggtcagaggt

SEQ ID NO: 5760 - DNA, 25 bp, synthetic construct
  source 1..25: mol_type = other DNA
gcaaggggtcgccgggggtcagagg

SEQ ID NO: 5761 - DNA, 25 bp, synthetic construct
  source 1..25: mol_type = other DNA
tgcaaggggtcgccgggggtcagag

SEQ ID NO: 5762 - DNA, 25 bp, synthetic construct
  source 1..25: mol_type = other DNA
gtgcaaggggtcgccgggggtcaga

SEQ ID NO: 5763 - DNA, 25 bp, synthetic construct
  source 1..25: mol_type = other DNA
agtgcaaggggtcgccgggggtcag

SEQ ID NO: 5764 - DNA, 25 bp, synthetic construct
  source 1..25: mol_type = other DNA
gagtgcaaggggtcgccgggggtca

SEQ ID NO: 5765 - DNA, 25 bp, synthetic construct
  source 1..25: mol_type = other DNA
agagtgcaaggggtcgccgggggtc

SEQ ID NO: 5766 - DNA, 25 bp, synthetic construct
  source 1..25: mol_type = other DNA
gagagtgcaaggggtcgccgggggt

SEQ ID NO: 5767 - DNA, 25 bp, synthetic construct
  source 1..25: mol_type = other DNA
ggagagtgcaaggggtcgccggggg

SEQ ID NO: 5768 - DNA, 25 bp, synthetic construct
  source 1..25: mol_type = other DNA
tggagagtgcaaggggtcgccgggg

SEQ ID NO: 5769 - DNA, 25 bp, synthetic construct
  source 1..25: mol_type = other DNA
atggagagtgcaaggggtcgccggg

SEQ ID NO: 5770 - DNA, 25 bp, synthetic construct
  source 1..25: mol_type = other DNA
catggagagtgcaaggggtcgccgg

SEQ ID NO: 5771 - DNA, 25 bp, synthetic construct
  source 1..25: mol_type = other DNA
tcatggagagtgcaaggggtcgccg

SEQ ID NO: 5772 - DNA, 25 bp, synthetic construct
  source 1..25: mol_type = other DNA
gtcatggagagtgcaaggggtcgcc

SEQ ID NO: 5773 - DNA, 25 bp, synthetic construct
  source 1..25: mol_type = other DNA
tgtcatggagagtgcaaggggtcgc

SEQ ID NO: 5774 - DNA, 25 bp, synthetic construct
  source 1..25: mol_type = other DNA
gtgtcatggagagtgcaaggggtcg

SEQ ID NO: 5775 - DNA, 25 bp, synthetic construct
  source 1..25: mol_type = other DNA
agtgtcatggagagtgcaaggggtc

SEQ ID NO: 5776 - DNA, 25 bp, synthetic construct
  source 1..25: mol_type = other DNA
aagtgtcatggagagtgcaaggggt

SEQ ID NO: 5777 - DNA, 25 bp, synthetic construct
  source 1..25: mol_type = other DNA
aaagtgtcatggagagtgcaagggg

SEQ ID NO: 5778 - DNA, 25 bp, synthetic construct
  source 1..25: mol_type = other DNA
gaaagtgtcatggagagtgcaaggg

SEQ ID NO: 5779 - DNA, 25 bp, synthetic construct
  source 1..25: mol_type = other DNA
agaaagtgtcatggagagtgcaagg

SEQ ID NO: 5780 - DNA, 25 bp, synthetic construct
  source 1..25: mol_type = other DNA
gagaaagtgtcatggagagtgcaag

SEQ ID NO: 5781 - DNA, 25 bp, synthetic construct
  source 1..25: mol_type = other DNA
agagaaagtgtcatggagagtgcaa

SEQ ID NO: 5782 - DNA, 25 bp, synthetic construct
  source 1..25: mol_type = other DNA
gagagaaagtgtcatggagagtgca

SEQ ID NO: 5783 - DNA, 25 bp, synthetic construct
  source 1..25: mol_type = other DNA
ggagagaaagtgtcatggagagtgc

SEQ ID NO: 5784 - DNA, 25 bp, synthetic construct
  source 1..25: mol_type = other DNA
gggagagaaagtgtcatggagagtg

SEQ ID NO: 5785 - DNA, 25 bp, synthetic construct
  source 1..25: mol_type = other DNA
tgggagagaaagtgtcatggagagt

SEQ ID NO: 5786 - DNA, 25 bp, synthetic construct
  source 1..25: mol_type = other DNA
atgggagagaaagtgtcatggagag

SEQ ID NO: 5787 - DNA, 25 bp, synthetic construct
  source 1..25: mol_type = other DNA
catgggagagaaagtgtcatggaga

SEQ ID NO: 5788 - DNA, 25 bp, synthetic construct
  source 1..25: mol_type = other DNA
ccatgggagagaaagtgtcatggag

SEQ ID NO: 5789 - DNA, 25 bp, synthetic construct
  source 1..25: mol_type = other DNA
accatgggagagaaagtgtcatgga

SEQ ID NO: 5790 - DNA, 25 bp, synthetic construct
  source 1..25: mol_type = other DNA
caccatgggagagaaagtgtcatgg

SEQ ID NO: 5791 - DNA, 25 bp, synthetic construct
  source 1..25: mol_type = other DNA
ccaccatgggagagaaagtgtcatg

SEQ ID NO: 5792 - DNA, 25 bp, synthetic construct
  source 1..25: mol_type = other DNA
gccaccatgggagagaaagtgtcat

SEQ ID NO: 5793 - DNA, 25 bp, synthetic construct
  source 1..25: mol_type = other DNA
tgccaccatgggagagaaagtgtca

SEQ ID NO: 5794 - DNA, 25 bp, synthetic construct
  source 1..25: mol_type = other DNA
ctgccaccatgggagagaaagtgtc

SEQ ID NO: 5795 - DNA, 25 bp, Homo sapiens
  source 1..25: mol_type = genomic DNA
gtgagggtcattgctcggcccctcc

SEQ ID NO: 5796 - DNA, 25 bp, Homo sapiens
  source 1..25: mol_type = genomic DNA
tgagggtcattgctcggcccctccc

SEQ ID NO: 5797 - DNA, 25 bp, Homo sapiens
  source 1..25: mol_type = genomic DNA
gagggtcattgctcggcccctccca

SEQ ID NO: 5798 - DNA, 25 bp, Homo sapiens
  source 1..25: mol_type = genomic DNA
agggtcattgctcggcccctcccat

SEQ ID NO: 5799 - DNA, 25 bp, Homo sapiens
  source 1..25: mol_type = genomic DNA
gggtcattgctcggcccctcccatg

SEQ ID NO: 5800 - DNA, 25 bp, Homo sapiens
  source 1..25: mol_type = genomic DNA
ggtcattgctcggcccctcccatgc

SEQ ID NO: 5801 - DNA, 25 bp, Homo sapiens
  source 1..25: mol_type = genomic DNA
gtcattgctcggcccctcccatgcc

SEQ ID NO: 5802 - DNA, 25 bp, Homo sapiens
  source 1..25: mol_type = genomic DNA
tcattgctcggcccctcccatgcca

SEQ ID NO: 5803 - DNA, 25 bp, Homo sapiens
  source 1..25: mol_type = genomic DNA
cattgctcggcccctcccatgccac

SEQ ID NO: 5804 - DNA, 25 bp, Homo sapiens
  source 1..25: mol_type = genomic DNA
attgctcggcccctcccatgccact

SEQ ID NO: 5805 - DNA, 25 bp, Homo sapiens
  source 1..25: mol_type = genomic DNA
ttgctcggcccctcccatgccactt

SEQ ID NO: 5806 - DNA, 25 bp, Homo sapiens
  source 1..25: mol_type = genomic DNA
tgctcggcccctcccatgccacttc

SEQ ID NO: 5807 - DNA, 25 bp, Homo sapiens
  source 1..25: mol_type = genomic DNA
gctcggcccctcccatgccacttcc

SEQ ID NO: 5808 - DNA, 25 bp, Homo sapiens
  source 1..25: mol_type = genomic DNA
ctcggcccctcccatgccacttcca

SEQ ID NO: 5809 - DNA, 25 bp, Homo sapiens
  source 1..25: mol_type = genomic DNA
tcggcccctcccatgccacttccac

SEQ ID NO: 5810 - DNA, 25 bp, Homo sapiens
  source 1..25: mol_type = genomic DNA
cggcccctcccatgccacttccact

SEQ ID NO: 5811 - DNA, 25 bp, Homo sapiens
  source 1..25: mol_type = genomic DNA
ggcccctcccatgccacttccactc

SEQ ID NO: 5812 - DNA, 25 bp, Homo sapiens
  source 1..25: mol_type = genomic DNA
gcccctcccatgccacttccactca

SEQ ID NO: 5813 - DNA, 25 bp, Homo sapiens
  source 1..25: mol_type = genomic DNA
cccctcccatgccacttccactcac

SEQ ID NO: 5814 - DNA, 25 bp, Homo sapiens
  source 1..25: mol_type = genomic DNA
ccctcccatgccacttccactcacc

SEQ ID NO: 5815 - DNA, 25 bp, Homo sapiens
  source 1..25: mol_type = genomic DNA
cctcccatgccacttccactcacca

SEQ ID NO: 5816 - DNA, 25 bp, Homo sapiens
  source 1..25: mol_type = genomic DNA
ctcccatgccacttccactcaccat

SEQ ID NO: 5817 - DNA, 25 bp, Homo sapiens
  source 1..25: mol_type = genomic DNA
tcccatgccacttccactcaccatt

SEQ ID NO: 5818 - DNA, 25 bp, Homo sapiens
  source 1..25: mol_type = genomic DNA
cccatgccacttccactcaccattc

SEQ ID NO: 5819 - DNA, 25 bp, Homo sapiens
  source 1..25: mol_type = genomic DNA
ccatgccacttccactcaccattcc

SEQ ID NO: 5820 - DNA, 25 bp, Homo sapiens
  source 1..25: mol_type = genomic DNA
catgccacttccactcaccattcct

SEQ ID NO: 5821 - DNA, 25 bp, Homo sapiens
  source 1..25: mol_type = genomic DNA
atgccacttccactcaccattcctg

SEQ ID NO: 5822 - DNA, 25 bp, Homo sapiens
  source 1..25: mol_type = genomic DNA
tgccacttccactcaccattcctgc

SEQ ID NO: 5823 - DNA, 25 bp, Homo sapiens
  source 1..25: mol_type = genomic DNA
gccacttccactcaccattcctgcc

SEQ ID NO: 5824 - DNA, 25 bp, Homo sapiens
  source 1..25: mol_type = genomic DNA
ccacttccactcaccattcctgcct

SEQ ID NO: 5825 - DNA, 25 bp, Homo sapiens
  source 1..25: mol_type = genomic DNA
cacttccactcaccattcctgcctg

SEQ ID NO: 5826 - DNA, 25 bp, Homo sapiens
  source 1..25: mol_type = genomic DNA
acttccactcaccattcctgcctgc

SEQ ID NO: 5827 - DNA, 25 bp, Homo sapiens
  source 1..25: mol_type = genomic DNA
cttccactcaccattcctgcctgcc

SEQ ID NO: 5828 - DNA, 25 bp, Homo sapiens
  source 1..25: mol_type = genomic DNA
ttccactcaccattcctgcctgccc

SEQ ID NO: 5829 - DNA, 25 bp, Homo sapiens
  source 1..25: mol_type = genomic DNA
tccactcaccattcctgcctgccca

SEQ ID NO: 5830 - DNA, 25 bp, Homo sapiens
  source 1..25: mol_type = genomic DNA
ccactcaccattcctgcctgcccag

SEQ ID NO: 5831 - DNA, 25 bp, Homo sapiens
  source 1..25: mol_type = genomic DNA
cactcaccattcctgcctgcccagc

SEQ ID NO: 5832 - DNA, 25 bp, Homo sapiens
  source 1..25: mol_type = genomic DNA
actcaccattcctgcctgcccagct

SEQ ID NO: 5833 - DNA, 25 bp, Homo sapiens
  source 1..25: mol_type = genomic DNA
ctcaccattcctgcctgcccagctc

SEQ ID NO: 5834 - DNA, 25 bp, Homo sapiens
  source 1..25: mol_type = genomic DNA
tcaccattcctgcctgcccagctct

SEQ ID NO: 5835 - DNA, 25 bp, Homo sapiens
  source 1..25: mol_type = genomic DNA
caccattcctgcctgcccagctctt

SEQ ID NO: 5836 - DNA, 25 bp, Homo sapiens
  source 1..25: mol_type = genomic DNA
accattcctgcctgcccagctcttc

SEQ ID NO: 5837 - DNA, 25 bp, Homo sapiens
  source 1..25: mol_type = genomic DNA
ccattcctgcctgcccagctcttcc

SEQ ID NO: 5838 - DNA, 25 bp, Homo sapiens
  source 1..25: mol_type = genomic DNA
cattcctgcctgcccagctcttcct

SEQ ID NO: 5839 - DNA, 25 bp, Homo sapiens
  source 1..25: mol_type = genomic DNA
attcctgcctgcccagctcttcctc

SEQ ID NO: 5840 - DNA, 25 bp, Homo sapiens
  source 1..25: mol_type = genomic DNA
ttcctgcctgcccagctcttcctct

SEQ ID NO: 5841 - DNA, 25 bp, Homo sapiens
  source 1..25: mol_type = genomic DNA
tcctgcctgcccagctcttcctctt

SEQ ID NO: 5842 - DNA, 25 bp, Homo sapiens
  source 1..25: mol_type = genomic DNA
cctgcctgcccagctcttcctcttt

SEQ ID NO: 5843 - DNA, 25 bp, Homo sapiens
  source 1..25: mol_type = genomic DNA
ctgcctgcccagctcttcctctttc

SEQ ID NO: 5844 - DNA, 25 bp, Homo sapiens
  source 1..25: mol_type = genomic DNA
tgcctgcccagctcttcctctttct

SEQ ID NO: 5845 - DNA, 25 bp, Homo sapiens
  source 1..25: mol_type = genomic DNA
gcctgcccagctcttcctctttctg

SEQ ID NO: 5846 - DNA, 25 bp, Homo sapiens
  source 1..25: mol_type = genomic DNA
cctgcccagctcttcctctttctgg

SEQ ID NO: 5847 - DNA, 25 bp, Homo sapiens
  source 1..25: mol_type = genomic DNA
ctgcccagctcttcctctttctggc

SEQ ID NO: 5848 - DNA, 25 bp, Homo sapiens
  source 1..25: mol_type = genomic DNA
tgcccagctcttcctctttctggcc

SEQ ID NO: 5849 - DNA, 25 bp, Homo sapiens
  source 1..25: mol_type = genomic DNA
gcccagctcttcctctttctggcca

SEQ ID NO: 5850 - DNA, 25 bp, Homo sapiens
  source 1..25: mol_type = genomic DNA
cccagctcttcctctttctggccac

SEQ ID NO: 5851 - DNA, 25 bp, Homo sapiens
  source 1..25: mol_type = genomic DNA
ccagctcttcctctttctggccaca

SEQ ID NO: 5852 - DNA, 25 bp, Homo sapiens
  source 1..25: mol_type = genomic DNA
cagctcttcctctttctggccacac

SEQ ID NO: 5853 - DNA, 25 bp, Homo sapiens
  source 1..25: mol_type = genomic DNA
agctcttcctctttctggccacacc

SEQ ID NO: 5854 - DNA, 25 bp, Homo sapiens
  source 1..25: mol_type = genomic DNA
gctcttcctctttctggccacacca

SEQ ID NO: 5855 - DNA, 25 bp, Homo sapiens
  source 1..25: mol_type = genomic DNA
ctcttcctctttctggccacaccat

SEQ ID NO: 5856 - DNA, 25 bp, Homo sapiens
  source 1..25: mol_type = genomic DNA
tcttcctctttctggccacaccatc

SEQ ID NO: 5857 - DNA, 25 bp, Homo sapiens
  source 1..25: mol_type = genomic DNA
cttcctctttctggccacaccatcc

SEQ ID NO: 5858 - DNA, 25 bp, Homo sapiens
  source 1..25: mol_type = genomic DNA
ttcctctttctggccacaccatcca

SEQ ID NO: 5859 - DNA, 25 bp, Homo sapiens
  source 1..25: mol_type = genomic DNA
tcctctttctggccacaccatccac

SEQ ID NO: 5860 - DNA, 25 bp, Homo sapiens
  source 1..25: mol_type = genomic DNA
cctctttctggccacaccatccaca

SEQ ID NO: 5861 - DNA, 25 bp, Homo sapiens
  source 1..25: mol_type = genomic DNA
ctctttctggccacaccatccacac

SEQ ID NO: 5862 - DNA, 25 bp, Homo sapiens
  source 1..25: mol_type = genomic DNA
tctttctggccacaccatccacact

SEQ ID NO: 5863 - DNA, 25 bp, Homo sapiens
  source 1..25: mol_type = genomic DNA
ctttctggccacaccatccacactc

SEQ ID NO: 5864 - DNA, 25 bp, Homo sapiens
  source 1..25: mol_type = genomic DNA
tttctggccacaccatccacactct

SEQ ID NO: 5865 - DNA, 25 bp, Homo sapiens
  source 1..25: mol_type = genomic DNA
ttctggccacaccatccacactctc

SEQ ID NO: 5866 - DNA, 25 bp, Homo sapiens
  source 1..25: mol_type = genomic DNA
tctggccacaccatccacactctcc

SEQ ID NO: 5867 - DNA, 25 bp, Homo sapiens
  source 1..25: mol_type = genomic DNA
ctggccacaccatccacactctcct

SEQ ID NO: 5868 - DNA, 25 bp, Homo sapiens
  source 1..25: mol_type = genomic DNA
tggccacaccatccacactctcctg

SEQ ID NO: 5869 - DNA, 25 bp, Homo sapiens
  source 1..25: mol_type = genomic DNA
ggccacaccatccacactctcctgg

SEQ ID NO: 5870 - DNA, 25 bp, Homo sapiens
  source 1..25: mol_type = genomic DNA
gccacaccatccacactctcctggc

SEQ ID NO: 5871 - DNA, 25 bp, Homo sapiens
  source 1..25: mol_type = genomic DNA
ccacaccatccacactctcctggcc

SEQ ID NO: 5872 - DNA, 25 bp, Homo sapiens
  source 1..25: mol_type = genomic DNA
cacaccatccacactctcctggccc

SEQ ID NO: 5873 - DNA, 25 bp, Homo sapiens
  source 1..25: mol_type = genomic DNA
acaccatccacactctcctggccct

SEQ ID NO: 5874 - DNA, 25 bp, Homo sapiens
  source 1..25: mol_type = genomic DNA
caccatccacactctcctggccctc

SEQ ID NO: 5875 - DNA, 25 bp, Homo sapiens
  source 1..25: mol_type = genomic DNA
accatccacactctcctggccctct

SEQ ID NO: 5876 - DNA, 25 bp, Homo sapiens
  source 1..25: mol_type = genomic DNA
ccatccacactctcctggccctctg

SEQ ID NO: 5877 - DNA, 25 bp, Homo sapiens
  source 1..25: mol_type = genomic DNA
catccacactctcctggccctctga

SEQ ID NO: 5878 - DNA, 25 bp, Homo sapiens
  source 1..25: mol_type = genomic DNA
atccacactctcctggccctctgag

SEQ ID NO: 5879 - DNA, 25 bp, Homo sapiens
  source 1..25: mol_type = genomic DNA
tccacactctcctggccctctgaga

SEQ ID NO: 5880 - DNA, 25 bp, Homo sapiens
  source 1..25: mol_type = genomic DNA
ccacactctcctggccctctgagac

SEQ ID NO: 5881 - DNA, 25 bp, Homo sapiens
  source 1..25: mol_type = genomic DNA
cacactctcctggccctctgagact

SEQ ID NO: 5882 - DNA, 25 bp, Homo sapiens
  source 1..25: mol_type = genomic DNA
acactctcctggccctctgagactg

SEQ ID NO: 5883 - DNA, 25 bp, Homo sapiens
  source 1..25: mol_type = genomic DNA
cactctcctggccctctgagactgc

SEQ ID NO: 5884 - DNA, 25 bp, Homo sapiens
  source 1..25: mol_type = genomic DNA
actctcctggccctctgagactgcc

SEQ ID NO: 5885 - DNA, 25 bp, Homo sapiens
  source 1..25: mol_type = genomic DNA
ctctcctggccctctgagactgccc

SEQ ID NO: 5886 - DNA, 25 bp, Homo sapiens
  source 1..25: mol_type = genomic DNA
tctcctggccctctgagactgcccg

SEQ ID NO: 5887 - DNA, 25 bp, Homo sapiens
  source 1..25: mol_type = genomic DNA
ctcctggccctctgagactgcccgc

SEQ ID NO: 5888 - DNA, 25 bp, Homo sapiens
  source 1..25: mol_type = genomic DNA
tcctggccctctgagactgcccgcc

SEQ ID NO: 5889 - DNA, 25 bp, Homo sapiens
  source 1..25: mol_type = genomic DNA
cctggccctctgagactgcccgcca

SEQ ID NO: 5890 - DNA, 25 bp, Homo sapiens
  source 1..25: mol_type = genomic DNA
ctggccctctgagactgcccgccat

SEQ ID NO: 5891 - DNA, 25 bp, Homo sapiens
  source 1..25: mol_type = genomic DNA
tggccctctgagactgcccgccatg

SEQ ID NO: 5892 - DNA, 25 bp, Homo sapiens
  source 1..25: mol_type = genomic DNA
ggccctctgagactgcccgccatgc

SEQ ID NO: 5893 - DNA, 25 bp, Homo sapiens
  source 1..25: mol_type = genomic DNA
gccctctgagactgcccgccatgcc

SEQ ID NO: 5894 - DNA, 25 bp, Homo sapiens
  source 1..25: mol_type = genomic DNA
ccctctgagactgcccgccatgcca

SEQ ID NO: 5895 - DNA, 25 bp, Homo sapiens
  source 1..25: mol_type = genomic DNA
cctctgagactgcccgccatgccat

SEQ ID NO: 5896 - DNA, 25 bp, Homo sapiens
  source 1..25: mol_type = genomic DNA
ctctgagactgcccgccatgccatt

SEQ ID NO: 5897 - DNA, 25 bp, Homo sapiens
  source 1..25: mol_type = genomic DNA
tctgagactgcccgccatgccattc

SEQ ID NO: 5898 - DNA, 25 bp, Homo sapiens
  source 1..25: mol_type = genomic DNA
ctgagactgcccgccatgccattcc

SEQ ID NO: 5899 - DNA, 25 bp, Homo sapiens
  source 1..25: mol_type = genomic DNA
tgagactgcccgccatgccattccc

SEQ ID NO: 5900 - DNA, 25 bp, Homo sapiens
  source 1..25: mol_type = genomic DNA
gagactgcccgccatgccattccct

SEQ ID NO: 5901 - DNA, 25 bp, Homo sapiens
  source 1..25: mol_type = genomic DNA
agactgcccgccatgccattccctt

SEQ ID NO: 5902 - DNA, 25 bp, Homo sapiens
  source 1..25: mol_type = genomic DNA
gactgcccgccatgccattcccttt

SEQ ID NO: 5903 - DNA, 25 bp, Homo sapiens
  source 1..25: mol_type = genomic DNA
actgcccgccatgccattcccttta

SEQ ID NO: 5904 - DNA, 25 bp, Homo sapiens
  source 1..25: mol_type = genomic DNA
ctgcccgccatgccattccctttac

SEQ ID NO: 5905 - DNA, 25 bp, Homo sapiens
  source 1..25: mol_type = genomic DNA
tgcccgccatgccattccctttacc

SEQ ID NO: 5906 - DNA, 25 bp, Homo sapiens
  source 1..25: mol_type = genomic DNA
gcccgccatgccattccctttacct

SEQ ID NO: 5907 - DNA, 25 bp, Homo sapiens
  source 1..25: mol_type = genomic DNA
cccgccatgccattccctttacctg

SEQ ID NO: 5908 - DNA, 25 bp, Homo sapiens
  source 1..25: mol_type = genomic DNA
ccgccatgccattccctttacctgg

SEQ ID NO: 5909 - DNA, 25 bp, Homo sapiens
  source 1..25: mol_type = genomic DNA
cgccatgccattccctttacctgga

SEQ ID NO: 5910 - DNA, 25 bp, Homo sapiens
  source 1..25: mol_type = genomic DNA
gccatgccattccctttacctggaa

SEQ ID NO: 5911 - DNA, 25 bp, Homo sapiens
  source 1..25: mol_type = genomic DNA
ccatgccattccctttacctggaaa

SEQ ID NO: 5912 - DNA, 25 bp, Homo sapiens
  source 1..25: mol_type = genomic DNA
catgccattccctttacctggaaaa

SEQ ID NO: 5913 - DNA, 25 bp, Homo sapiens
  source 1..25: mol_type = genomic DNA
atgccattccctttacctggaaaac

SEQ ID NO: 5914 - DNA, 25 bp, Homo sapiens
  source 1..25: mol_type = genomic DNA
tgccattccctttacctggaaaact

SEQ ID NO: 5915 - DNA, 25 bp, Homo sapiens
  source 1..25: mol_type = genomic DNA
gccattccctttacctggaaaactc

SEQ ID NO: 5916 - DNA, 25 bp, Homo sapiens
  source 1..25: mol_type = genomic DNA
ccattccctttacctggaaaactcc

SEQ ID NO: 5917 - DNA, 25 bp, Homo sapiens
  source 1..25: mol_type = genomic DNA
cattccctttacctggaaaactcct

SEQ ID NO: 5918 - DNA, 25 bp, Homo sapiens
  source 1..25: mol_type = genomic DNA
attccctttacctggaaaactcctc

SEQ ID NO: 5919 - DNA, 25 bp, Homo sapiens
  source 1..25: mol_type = genomic DNA
ttccctttacctggaaaactcctcc

SEQ ID NO: 5920 - DNA, 25 bp, Homo sapiens
  source 1..25: mol_type = genomic DNA
tccctttacctggaaaactcctccc

SEQ ID NO: 5921 - DNA, 25 bp, Homo sapiens
  source 1..25: mol_type = genomic DNA
ccctttacctggaaaactcctccct

SEQ ID NO: 5922 - DNA, 25 bp, Homo sapiens
  source 1..25: mol_type = genomic DNA
cctttacctggaaaactcctcccta

SEQ ID NO: 5923 - DNA, 25 bp, Homo sapiens
  source 1..25: mol_type = genomic DNA
ctttacctggaaaactcctccctat

SEQ ID NO: 5924 - DNA, 25 bp, Homo sapiens
  source 1..25: mol_type = genomic DNA
tttacctggaaaactcctccctatc

SEQ ID NO: 5925 - DNA, 25 bp, Homo sapiens
  source 1..25: mol_type = genomic DNA
ttacctggaaaactcctccctatcc

SEQ ID NO: 5926 - DNA, 25 bp, Homo sapiens
  source 1..25: mol_type = genomic DNA
tacctggaaaactcctccctatcca

SEQ ID NO: 5927 - DNA, 25 bp, Homo sapiens
  source 1..25: mol_type = genomic DNA
acctggaaaactcctccctatccat

SEQ ID NO: 5928 - DNA, 25 bp, Homo sapiens
  source 1..25: mol_type = genomic DNA
cctggaaaactcctccctatccatc

SEQ ID NO: 5929 - DNA, 25 bp, Homo sapiens
  source 1..25: mol_type = genomic DNA
ctggaaaactcctccctatccatca

SEQ ID NO: 5930 - DNA, 25 bp, Homo sapiens
  source 1..25: mol_type = genomic DNA
tggaaaactcctccctatccatcaa

SEQ ID NO: 5931 - DNA, 25 bp, Homo sapiens
  source 1..25: mol_type = genomic DNA
ggaaaactcctccctatccatcaaa

SEQ ID NO: 5932 - DNA, 25 bp, Homo sapiens
  source 1..25: mol_type = genomic DNA
gaaaactcctccctatccatcaaag

SEQ ID NO: 5933 - DNA, 25 bp, Homo sapiens
  source 1..25: mol_type = genomic DNA
aaaactcctccctatccatcaaagt

SEQ ID NO: 5934 - DNA, 25 bp, Homo sapiens
  source 1..25: mol_type = genomic DNA
aaactcctccctatccatcaaagtc

SEQ ID NO: 5935 - DNA, 25 bp, Homo sapiens
  source 1..25: mol_type = genomic DNA
aactcctccctatccatcaaagtcc

SEQ ID NO: 5936 - DNA, 25 bp, Homo sapiens
  source 1..25: mol_type = genomic DNA
actcctccctatccatcaaagtcca

SEQ ID NO: 5937 - DNA, 25 bp, Homo sapiens
  source 1..25: mol_type = genomic DNA
ctcctccctatccatcaaagtccag

SEQ ID NO: 5938 - DNA, 25 bp, Homo sapiens
  source 1..25: mol_type = genomic DNA
tcctccctatccatcaaagtccaga

SEQ ID NO: 5939 - DNA, 25 bp, Homo sapiens
  source 1..25: mol_type = genomic DNA
cctccctatccatcaaagtccagat

SEQ ID NO: 5940 - DNA, 25 bp, Homo sapiens
  source 1..25: mol_type = genomic DNA
ctccctatccatcaaagtccagatt

SEQ ID NO: 5941 - DNA, 25 bp, Homo sapiens
  source 1..25: mol_type = genomic DNA
tccctatccatcaaagtccagattc

SEQ ID NO: 5942 - DNA, 25 bp, Homo sapiens
  source 1..25: mol_type = genomic DNA
ccctatccatcaaagtccagattca

SEQ ID NO: 5943 - DNA, 25 bp, Homo sapiens
  source 1..25: mol_type = genomic DNA
cctatccatcaaagtccagattcag

SEQ ID NO: 5944 - DNA, 25 bp, Homo sapiens
  source 1..25: mol_type = genomic DNA
ctatccatcaaagtccagattcagg

SEQ ID NO: 5945 - DNA, 25 bp, Homo sapiens
  source 1..25: mol_type = genomic DNA
tatccatcaaagtccagattcaggg

SEQ ID NO: 5946 - DNA, 25 bp, Homo sapiens
  source 1..25: mol_type = genomic DNA
atccatcaaagtccagattcagggt

SEQ ID NO: 5947 - DNA, 25 bp, Homo sapiens
  source 1..25: mol_type = genomic DNA
tccatcaaagtccagattcagggtc

SEQ ID NO: 5948 - DNA, 25 bp, Homo sapiens
  source 1..25: mol_type = genomic DNA
ccatcaaagtccagattcagggtca

SEQ ID NO: 5949 - DNA, 25 bp, Homo sapiens
  source 1..25: mol_type = genomic DNA
catcaaagtccagattcagggtcac

SEQ ID NO: 5950 - DNA, 25 bp, Homo sapiens
  source 1..25: mol_type = genomic DNA
atcaaagtccagattcagggtcacc

SEQ ID NO: 5951 - DNA, 25 bp, Homo sapiens
  source 1..25: mol_type = genomic DNA
tcaaagtccagattcagggtcacct

SEQ ID NO: 5952 - DNA, 25 bp, Homo sapiens
  source 1..25: mol_type = genomic DNA
caaagtccagattcagggtcacctc

SEQ ID NO: 5953 - DNA, 25 bp, Homo sapiens
  source 1..25: mol_type = genomic DNA
aaagtccagattcagggtcacctcc

SEQ ID NO: 5954 - DNA, 25 bp, Homo sapiens
  source 1..25: mol_type = genomic DNA
aagtccagattcagggtcacctcct

SEQ ID NO: 5955 - DNA, 25 bp, Homo sapiens
  source 1..25: mol_type = genomic DNA
agtccagattcagggtcacctcctc

SEQ ID NO: 5956 - DNA, 25 bp, Homo sapiens
  source 1..25: mol_type = genomic DNA
gtccagattcagggtcacctcctct

SEQ ID NO: 5957 - DNA, 25 bp, Homo sapiens
  source 1..25: mol_type = genomic DNA
tccagattcagggtcacctcctctg

SEQ ID NO: 5958 - DNA, 25 bp, Homo sapiens
  source 1..25: mol_type = genomic DNA
ccagattcagggtcacctcctctgg

SEQ ID NO: 5959 - DNA, 25 bp, Homo sapiens
  source 1..25: mol_type = genomic DNA
cagattcagggtcacctcctctggg

SEQ ID NO: 5960 - DNA, 25 bp, Homo sapiens
  source 1..25: mol_type = genomic DNA
agattcagggtcacctcctctggga

SEQ ID NO: 5961 - DNA, 25 bp, Homo sapiens
  source 1..25: mol_type = genomic DNA
gattcagggtcacctcctctgggaa

SEQ ID NO: 5962 - DNA, 25 bp, Homo sapiens
  source 1..25: mol_type = genomic DNA
attcagggtcacctcctctgggaag

SEQ ID NO: 5963 - DNA, 25 bp, Homo sapiens
  source 1..25: mol_type = genomic DNA
ttcagggtcacctcctctgggaagc

SEQ ID NO: 5964 - DNA, 25 bp, Homo sapiens
  source 1..25: mol_type = genomic DNA
tcagggtcacctcctctgggaagcc

SEQ ID NO: 5965 - DNA, 25 bp, Homo sapiens
  source 1..25: mol_type = genomic DNA
cagggtcacctcctctgggaagccc

SEQ ID NO: 5966 - DNA, 25 bp, Homo sapiens
  source 1..25: mol_type = genomic DNA
agggtcacctcctctgggaagccca

SEQ ID NO: 5967 - DNA, 25 bp, Homo sapiens
  source 1..25: mol_type = genomic DNA
gggtcacctcctctgggaagcccac

SEQ ID NO: 5968 - DNA, 25 bp, Homo sapiens
  source 1..25: mol_type = genomic DNA
ggtcacctcctctgggaagcccacc

SEQ ID NO: 5969 - DNA, 25 bp, Homo sapiens
  source 1..25: mol_type = genomic DNA
gtcacctcctctgggaagcccacct

SEQ ID NO: 5970 - DNA, 25 bp, Homo sapiens
  source 1..25: mol_type = genomic DNA
tcacctcctctgggaagcccacctt

SEQ ID NO: 5971 - DNA, 25 bp, Homo sapiens
  source 1..25: mol_type = genomic DNA
cacctcctctgggaagcccaccttg

SEQ ID NO: 5972 - DNA, 25 bp, Homo sapiens
  source 1..25: mol_type = genomic DNA
acctcctctgggaagcccaccttgg

SEQ ID NO: 5973 - DNA, 25 bp, Homo sapiens
  source 1..25: mol_type = genomic DNA
cctcctctgggaagcccaccttggc

SEQ ID NO: 5974 - DNA, 25 bp, Homo sapiens
  source 1..25: mol_type = genomic DNA
ctcctctgggaagcccaccttggcc

SEQ ID NO: 5975 - DNA, 25 bp, Homo sapiens
  source 1..25: mol_type = genomic DNA
tcctctgggaagcccaccttggcct

SEQ ID NO: 5976 - DNA, 25 bp, Homo sapiens
  source 1..25: mol_type = genomic DNA
cctctgggaagcccaccttggcctc

SEQ ID NO: 5977 - DNA, 25 bp, Homo sapiens
  source 1..25: mol_type = genomic DNA
ctctgggaagcccaccttggcctcc

SEQ ID NO: 5978 - DNA, 25 bp, Homo sapiens
  source 1..25: mol_type = genomic DNA
tctgggaagcccaccttggcctcca

SEQ ID NO: 5979 - DNA, 25 bp, Homo sapiens
  source 1..25: mol_type = genomic DNA
ctgggaagcccaccttggcctccag

SEQ ID NO: 5980 - DNA, 25 bp, Homo sapiens
  source 1..25: mol_type = genomic DNA
tgggaagcccaccttggcctccagg

SEQ ID NO: 5981 - DNA, 25 bp, Homo sapiens
  source 1..25: mol_type = genomic DNA
gggaagcccaccttggcctccaggt

SEQ ID NO: 5982 - DNA, 25 bp, Homo sapiens
  source 1..25: mol_type = genomic DNA
ggaagcccaccttggcctccaggtt

SEQ ID NO: 5983 - DNA, 25 bp, Homo sapiens
  source 1..25: mol_type = genomic DNA
gaagcccaccttggcctccaggttg

SEQ ID NO: 5984 - DNA, 25 bp, Homo sapiens
  source 1..25: mol_type = genomic DNA
aagcccaccttggcctccaggttga

SEQ ID NO: 5985 - DNA, 25 bp, Homo sapiens
  source 1..25: mol_type = genomic DNA
agcccaccttggcctccaggttgac

SEQ ID NO: 5986 - DNA, 25 bp, Homo sapiens
  source 1..25: mol_type = genomic DNA
gcccaccttggcctccaggttgact

SEQ ID NO: 5987 - DNA, 25 bp, Homo sapiens
  source 1..25: mol_type = genomic DNA
cccaccttggcctccaggttgactc

SEQ ID NO: 5988 - DNA, 25 bp, Homo sapiens
  source 1..25: mol_type = genomic DNA
ccaccttggcctccaggttgactct

SEQ ID NO: 5989 - DNA, 25 bp, Homo sapiens
  source 1..25: mol_type = genomic DNA
caccttggcctccaggttgactctc

SEQ ID NO: 5990 - DNA, 25 bp, Homo sapiens
  source 1..25: mol_type = genomic DNA
accttggcctccaggttgactctca

SEQ ID NO: 5991 - DNA, 25 bp, Homo sapiens
  source 1..25: mol_type = genomic DNA
ccttggcctccaggttgactctcac

SEQ ID NO: 5992 - DNA, 25 bp, Homo sapiens
  source 1..25: mol_type = genomic DNA
cttggcctccaggttgactctcact

SEQ ID NO: 5993 - DNA, 25 bp, Homo sapiens
  source 1..25: mol_type = genomic DNA
ttggcctccaggttgactctcacta

SEQ ID NO: 5994 - DNA, 25 bp, Homo sapiens
  source 1..25: mol_type = genomic DNA
tggcctccaggttgactctcactac

SEQ ID NO: 5995 - DNA, 25 bp, Homo sapiens
  source 1..25: mol_type = genomic DNA
ggcctccaggttgactctcactact

SEQ ID NO: 5996 - DNA, 25 bp, Homo sapiens
  source 1..25: mol_type = genomic DNA
gcctccaggttgactctcactactc

SEQ ID NO: 5997 - DNA, 25 bp, Homo sapiens
  source 1..25: mol_type = genomic DNA
cctccaggttgactctcactactca

SEQ ID NO: 5998 - DNA, 25 bp, Homo sapiens
  source 1..25: mol_type = genomic DNA
ctccaggttgactctcactactcat

SEQ ID NO: 5999 - DNA, 25 bp, Homo sapiens
  source 1..25: mol_type = genomic DNA
tccaggttgactctcactactcatc

SEQ ID NO: 6000 - DNA, 25 bp, Homo sapiens
  source 1..25: mol_type = genomic DNA
ccaggttgactctcactactcatca

SEQ ID NO: 6001 - DNA, 25 bp, Homo sapiens
  source 1..25: mol_type = genomic DNA
caggttgactctcactactcatcat

SEQ ID NO: 6002 - DNA, 25 bp, Homo sapiens
  source 1..25: mol_type = genomic DNA
aggttgactctcactactcatcatc

SEQ ID NO: 6003 - DNA, 25 bp, Homo sapiens
  source 1..25: mol_type = genomic DNA
ggttgactctcactactcatcatca

SEQ ID NO: 6004 - DNA, 25 bp, Homo sapiens
  source 1..25: mol_type = genomic DNA
gttgactctcactactcatcatcag

SEQ ID NO: 6005 - DNA, 25 bp, Homo sapiens
  source 1..25: mol_type = genomic DNA
ttgactctcactactcatcatcagg

SEQ ID NO: 6006 - DNA, 25 bp, Homo sapiens
  source 1..25: mol_type = genomic DNA
tgactctcactactcatcatcaggt

SEQ ID NO: 6007 - DNA, 25 bp, Homo sapiens
  source 1..25: mol_type = genomic DNA
gactctcactactcatcatcaggtt

SEQ ID NO: 6008 - DNA, 25 bp, Homo sapiens
  source 1..25: mol_type = genomic DNA
actctcactactcatcatcaggttc

SEQ ID NO: 6009 - DNA, 25 bp, Homo sapiens
  source 1..25: mol_type = genomic DNA
ctctcactactcatcatcaggttct

SEQ ID NO: 6010 - DNA, 25 bp, Homo sapiens
  source 1..25: mol_type = genomic DNA
tctcactactcatcatcaggttctt

SEQ ID NO: 6011 - DNA, 25 bp, Homo sapiens
  source 1..25: mol_type = genomic DNA
ctcactactcatcatcaggttcttc

SEQ ID NO: 6012 - DNA, 25 bp, Homo sapiens
  source 1..25: mol_type = genomic DNA
tcactactcatcatcaggttcttcc

SEQ ID NO: 6013 - DNA, 25 bp, Homo sapiens
  source 1..25: mol_type = genomic DNA
cactactcatcatcaggttcttcct

SEQ ID NO: 6014 - DNA, 25 bp, Homo sapiens
  source 1..25: mol_type = genomic DNA
actactcatcatcaggttcttcctt

SEQ ID NO: 6015 - DNA, 25 bp, Homo sapiens
  source 1..25: mol_type = genomic DNA
ctactcatcatcaggttcttccttc

SEQ ID NO: 6016 - DNA, 25 bp, Homo sapiens
  source 1..25: mol_type = genomic DNA
tactcatcatcaggttcttccttct

SEQ ID NO: 6017 - DNA, 25 bp, Homo sapiens
  source 1..25: mol_type = genomic DNA
actcatcatcaggttcttccttcta

SEQ ID NO: 6018 - DNA, 25 bp, Homo sapiens
  source 1..25: mol_type = genomic DNA
ctcatcatcaggttcttccttctat

SEQ ID NO: 6019 - DNA, 25 bp, Homo sapiens
  source 1..25: mol_type = genomic DNA
tcatcatcaggttcttccttctatt

SEQ ID NO: 6020 - DNA, 25 bp, Homo sapiens
  source 1..25: mol_type = genomic DNA
catcatcaggttcttccttctattc

SEQ ID NO: 6021 - DNA, 25 bp, Homo sapiens
  source 1..25: mol_type = genomic DNA
atcatcaggttcttccttctattcc

SEQ ID NO: 6022 - DNA, 25 bp, Homo sapiens
  source 1..25: mol_type = genomic DNA
tcatcaggttcttccttctattcca

SEQ ID NO: 6023 - DNA, 25 bp, Homo sapiens
  source 1..25: mol_type = genomic DNA
catcaggttcttccttctattccag

SEQ ID NO: 6024 - DNA, 25 bp, Homo sapiens
  source 1..25: mol_type = genomic DNA
atcaggttcttccttctattccagc

SEQ ID NO: 6025 - DNA, 25 bp, Homo sapiens
  source 1..25: mol_type = genomic DNA
tcaggttcttccttctattccagcc

SEQ ID NO: 6026 - DNA, 25 bp, Homo sapiens
  source 1..25: mol_type = genomic DNA
caggttcttccttctattccagccc

SEQ ID NO: 6027 - DNA, 25 bp, Homo sapiens
  source 1..25: mol_type = genomic DNA
aggttcttccttctattccagccct

SEQ ID NO: 6028 - DNA, 25 bp, Homo sapiens
  source 1..25: mol_type = genomic DNA
ggttcttccttctattccagcccta

SEQ ID NO: 6029 - DNA, 25 bp, Homo sapiens
  source 1..25: mol_type = genomic DNA
gttcttccttctattccagccctaa

SEQ ID NO: 6030 - DNA, 25 bp, Homo sapiens
  source 1..25: mol_type = genomic DNA
ttcttccttctattccagccctaac

SEQ ID NO: 6031 - DNA, 25 bp, Homo sapiens
  source 1..25: mol_type = genomic DNA
tcttccttctattccagccctaacc

SEQ ID NO: 6032 - DNA, 25 bp, Homo sapiens
  source 1..25: mol_type = genomic DNA
cttccttctattccagccctaacca

SEQ ID NO: 6033 - DNA, 25 bp, Homo sapiens
  source 1..25: mol_type = genomic DNA
ttccttctattccagccctaaccac

SEQ ID NO: 6034 - DNA, 25 bp, Homo sapiens
  source 1..25: mol_type = genomic DNA
tccttctattccagccctaaccact

SEQ ID NO: 6035 - DNA, 25 bp, Homo sapiens
  source 1..25: mol_type = genomic DNA
ccttctattccagccctaaccactc

SEQ ID NO: 6036 - DNA, 25 bp, Homo sapiens
  source 1..25: mol_type = genomic DNA
cttctattccagccctaaccactca

SEQ ID NO: 6037 - DNA, 25 bp, Homo sapiens
  source 1..25: mol_type = genomic DNA
ttctattccagccctaaccactcag

SEQ ID NO: 6038 - DNA, 25 bp, Homo sapiens
  source 1..25: mol_type = genomic DNA
tctattccagccctaaccactcagg

SEQ ID NO: 6039 - DNA, 25 bp, Homo sapiens
  source 1..25: mol_type = genomic DNA
ctattccagccctaaccactcagga

SEQ ID NO: 6040 - DNA, 25 bp, Homo sapiens
  source 1..25: mol_type = genomic DNA
tattccagccctaaccactcaggat

SEQ ID NO: 6041 - DNA, 25 bp, Homo sapiens
  source 1..25: mol_type = genomic DNA
attccagccctaaccactcaggatt

SEQ ID NO: 6042 - DNA, 25 bp, Homo sapiens
  source 1..25: mol_type = genomic DNA
ttccagccctaaccactcaggattg

SEQ ID NO: 6043 - DNA, 25 bp, Homo sapiens
  source 1..25: mol_type = genomic DNA
tccagccctaaccactcaggattgg

SEQ ID NO: 6044 - DNA, 25 bp, Homo sapiens
  source 1..25: mol_type = genomic DNA
ccagccctaaccactcaggattggg

SEQ ID NO: 6045 - DNA, 25 bp, Homo sapiens
  source 1..25: mol_type = genomic DNA
cagccctaaccactcaggattgggc

SEQ ID NO: 6046 - DNA, 25 bp, Homo sapiens
  source 1..25: mol_type = genomic DNA
agccctaaccactcaggattgggcc

SEQ ID NO: 6047 - DNA, 25 bp, Homo sapiens
  source 1..25: mol_type = genomic DNA
gccctaaccactcaggattgggccg

SEQ ID NO: 6048 - DNA, 25 bp, Homo sapiens
  source 1..25: mol_type = genomic DNA
ccctaaccactcaggattgggccgt

SEQ ID NO: 6049 - DNA, 25 bp, Homo sapiens
  source 1..25: mol_type = genomic DNA
cctaaccactcaggattgggccgtt

SEQ ID NO: 6050 - DNA, 25 bp, Homo sapiens
  source 1..25: mol_type = genomic DNA
ctaaccactcaggattgggccgttt

SEQ ID NO: 6051 - DNA, 25 bp, Homo sapiens
  source 1..25: mol_type = genomic DNA
taaccactcaggattgggccgtttg

SEQ ID NO: 6052 - DNA, 25 bp, Homo sapiens
  source 1..25: mol_type = genomic DNA
aaccactcaggattgggccgtttgt

SEQ ID NO: 6053 - DNA, 25 bp, Homo sapiens
  source 1..25: mol_type = genomic DNA
accactcaggattgggccgtttgtg

SEQ ID NO: 6054 - DNA, 25 bp, Homo sapiens
  source 1..25: mol_type = genomic DNA
ccactcaggattgggccgtttgtgt

SEQ ID NO: 6055 - DNA, 25 bp, Homo sapiens
  source 1..25: mol_type = genomic DNA
cactcaggattgggccgtttgtgtc

SEQ ID NO: 6056 - DNA, 25 bp, Homo sapiens
  source 1..25: mol_type = genomic DNA
actcaggattgggccgtttgtgtct

SEQ ID NO: 6057 - DNA, 25 bp, Homo sapiens
  source 1..25: mol_type = genomic DNA
ctcaggattgggccgtttgtgtctg

SEQ ID NO: 6058 - DNA, 25 bp, Homo sapiens
  source 1..25: mol_type = genomic DNA
tcaggattgggccgtttgtgtctgg

SEQ ID NO: 6059 - DNA, 25 bp, Homo sapiens
  source 1..25: mol_type = genomic DNA
caggattgggccgtttgtgtctggg

SEQ ID NO: 6060 - DNA, 25 bp, Homo sapiens
  source 1..25: mol_type = genomic DNA
aggattgggccgtttgtgtctgggt

SEQ ID NO: 6061 - DNA, 25 bp, Homo sapiens
  source 1..25: mol_type = genomic DNA
ggattgggccgtttgtgtctgggta

SEQ ID NO: 6062 - DNA, 25 bp, Homo sapiens
  source 1..25: mol_type = genomic DNA
gattgggccgtttgtgtctgggtat

SEQ ID NO: 6063 - DNA, 25 bp, Homo sapiens
  source 1..25: mol_type = genomic DNA
attgggccgtttgtgtctgggtatg

SEQ ID NO: 6064 - DNA, 25 bp, Homo sapiens
  source 1..25: mol_type = genomic DNA
ttgggccgtttgtgtctgggtatgt

SEQ ID NO: 6065 - DNA, 25 bp, Homo sapiens
  source 1..25: mol_type = genomic DNA
tgggccgtttgtgtctgggtatgtc

SEQ ID NO: 6066 - DNA, 25 bp, Homo sapiens
  source 1..25: mol_type = genomic DNA
gggccgtttgtgtctgggtatgtct

SEQ ID NO: 6067 - DNA, 25 bp, Homo sapiens
  source 1..25: mol_type = genomic DNA
ggccgtttgtgtctgggtatgtctc

SEQ ID NO: 6068 - DNA, 25 bp, Homo sapiens
  source 1..25: mol_type = genomic DNA
gccgtttgtgtctgggtatgtctct

SEQ ID NO: 6069 - DNA, 25 bp, Homo sapiens
  source 1..25: mol_type = genomic DNA
ccgtttgtgtctgggtatgtctctt

SEQ ID NO: 6070 - DNA, 25 bp, Homo sapiens
  source 1..25: mol_type = genomic DNA
cgtttgtgtctgggtatgtctcttc

SEQ ID NO: 6071 - DNA, 25 bp, Homo sapiens
  source 1..25: mol_type = genomic DNA
gtttgtgtctgggtatgtctcttcc

SEQ ID NO: 6072 - DNA, 25 bp, Homo sapiens
  source 1..25: mol_type = genomic DNA
tttgtgtctgggtatgtctcttcca

SEQ ID NO: 6073 - DNA, 25 bp, Homo sapiens
  source 1..25: mol_type = genomic DNA
ttgtgtctgggtatgtctcttccag

SEQ ID NO: 6074 - DNA, 25 bp, Homo sapiens
  source 1..25: mol_type = genomic DNA
tgtgtctgggtatgtctcttccagc

SEQ ID NO: 6075 - DNA, 25 bp, Homo sapiens
  source 1..25: mol_type = genomic DNA
gtgtctgggtatgtctcttccagct

SEQ ID NO: 6076 - DNA, 25 bp, Homo sapiens
  source 1..25: mol_type = genomic DNA
tgtctgggtatgtctcttccagctg

SEQ ID NO: 6077 - DNA, 25 bp, Homo sapiens
  source 1..25: mol_type = genomic DNA
gtctgggtatgtctcttccagctgc

SEQ ID NO: 6078 - DNA, 25 bp, Homo sapiens
  source 1..25: mol_type = genomic DNA
tctgggtatgtctcttccagctgcc

SEQ ID NO: 6079 - DNA, 25 bp, Homo sapiens
  source 1..25: mol_type = genomic DNA
ctgggtatgtctcttccagctgcct

SEQ ID NO: 6080 - DNA, 25 bp, Homo sapiens
  source 1..25: mol_type = genomic DNA
tgggtatgtctcttccagctgcctg

SEQ ID NO: 6081 - DNA, 25 bp, Homo sapiens
  source 1..25: mol_type = genomic DNA
gggtatgtctcttccagctgcctgg

SEQ ID NO: 6082 - DNA, 25 bp, Homo sapiens
  source 1..25: mol_type = genomic DNA
ggtatgtctcttccagctgcctggg

SEQ ID NO: 6083 - DNA, 25 bp, Homo sapiens
  source 1..25: mol_type = genomic DNA
gtatgtctcttccagctgcctgggt

SEQ ID NO: 6084 - DNA, 25 bp, Homo sapiens
  source 1..25: mol_type = genomic DNA
tatgtctcttccagctgcctgggtt

SEQ ID NO: 6085 - DNA, 25 bp, Homo sapiens
  source 1..25: mol_type = genomic DNA
atgtctcttccagctgcctgggttt

SEQ ID NO: 6086 - DNA, 25 bp, Homo sapiens
  source 1..25: mol_type = genomic DNA
tgtctcttccagctgcctgggtttc

SEQ ID NO: 6087 - DNA, 25 bp, Homo sapiens
  source 1..25: mol_type = genomic DNA
gtctcttccagctgcctgggtttcc

SEQ ID NO: 6088 - DNA, 25 bp, Homo sapiens
  source 1..25: mol_type = genomic DNA
tctcttccagctgcctgggtttcct

SEQ ID NO: 6089 - DNA, 25 bp, Homo sapiens
  source 1..25: mol_type = genomic DNA
ctcttccagctgcctgggtttcctg

SEQ ID NO: 6090 - DNA, 25 bp, Homo sapiens
  source 1..25: mol_type = genomic DNA
tcttccagctgcctgggtttcctgg

SEQ ID NO: 6091 - DNA, 25 bp, Homo sapiens
  source 1..25: mol_type = genomic DNA
cttccagctgcctgggtttcctgga

SEQ ID NO: 6092 - DNA, 25 bp, Homo sapiens
  source 1..25: mol_type = genomic DNA
ttccagctgcctgggtttcctggaa

SEQ ID NO: 6093 - DNA, 25 bp, Homo sapiens
  source 1..25: mol_type = genomic DNA
tccagctgcctgggtttcctggaaa

SEQ ID NO: 6094 - DNA, 25 bp, Homo sapiens
  source 1..25: mol_type = genomic DNA
ccagctgcctgggtttcctggaaag

SEQ ID NO: 6095 - DNA, 25 bp, Homo sapiens
  source 1..25: mol_type = genomic DNA
cagctgcctgggtttcctggaaaga

SEQ ID NO: 6096 - DNA, 25 bp, Homo sapiens
  source 1..25: mol_type = genomic DNA
agctgcctgggtttcctggaaagaa

SEQ ID NO: 6097 - DNA, 25 bp, Homo sapiens
  source 1..25: mol_type = genomic DNA
gctgcctgggtttcctggaaagaac

SEQ ID NO: 6098 - DNA, 25 bp, Homo sapiens
  source 1..25: mol_type = genomic DNA
ctgcctgggtttcctggaaagaact

SEQ ID NO: 6099 - DNA, 25 bp, Homo sapiens
  source 1..25: mol_type = genomic DNA
tgcctgggtttcctggaaagaactc

SEQ ID NO: 6100 - DNA, 25 bp, Homo sapiens
  source 1..25: mol_type = genomic DNA
gcctgggtttcctggaaagaactct

SEQ ID NO: 6101 - DNA, 25 bp, Homo sapiens
  source 1..25: mol_type = genomic DNA
cctgggtttcctggaaagaactctt

SEQ ID NO: 6102 - DNA, 25 bp, Homo sapiens
  source 1..25: mol_type = genomic DNA
ctgggtttcctggaaagaactctta

SEQ ID NO: 6103 - DNA, 25 bp, Homo sapiens
  source 1..25: mol_type = genomic DNA
tgggtttcctggaaagaactcttat

SEQ ID NO: 6104 - DNA, 25 bp, Homo sapiens
  source 1..25: mol_type = genomic DNA
gggtttcctggaaagaactcttatc

SEQ ID NO: 6105 - DNA, 25 bp, Homo sapiens
  source 1..25: mol_type = genomic DNA
ggtttcctggaaagaactcttatcc

SEQ ID NO: 6106 - DNA, 25 bp, Homo sapiens
  source 1..25: mol_type = genomic DNA
gtttcctggaaagaactcttatccc

SEQ ID NO: 6107 - DNA, 25 bp, Homo sapiens
  source 1..25: mol_type = genomic DNA
tttcctggaaagaactcttatcccc

SEQ ID NO: 6108 - DNA, 25 bp, Homo sapiens
  source 1..25: mol_type = genomic DNA
ttcctggaaagaactcttatcccca

SEQ ID NO: 6109 - DNA, 25 bp, Homo sapiens
  source 1..25: mol_type = genomic DNA
tcctggaaagaactcttatccccag

SEQ ID NO: 6110 - DNA, 25 bp, Homo sapiens
  source 1..25: mol_type = genomic DNA
cctggaaagaactcttatccccagg

SEQ ID NO: 6111 - DNA, 25 bp, Homo sapiens
  source 1..25: mol_type = genomic DNA
ctggaaagaactcttatccccagga

SEQ ID NO: 6112 - DNA, 25 bp, Homo sapiens
  source 1..25: mol_type = genomic DNA
tggaaagaactcttatccccaggaa

SEQ ID NO: 6113 - DNA, 25 bp, Homo sapiens
  source 1..25: mol_type = genomic DNA
ggaaagaactcttatccccaggaac

SEQ ID NO: 6114 - DNA, 25 bp, Homo sapiens
  source 1..25: mol_type = genomic DNA
gaaagaactcttatccccaggaact

SEQ ID NO: 6115 - DNA, 25 bp, Homo sapiens
  source 1..25: mol_type = genomic DNA
aaagaactcttatccccaggaacta

SEQ ID NO: 6116 - DNA, 25 bp, Homo sapiens
  source 1..25: mol_type = genomic DNA
aagaactcttatccccaggaactag

SEQ ID NO: 6117 - DNA, 25 bp, Homo sapiens
  source 1..25: mol_type = genomic DNA
agaactcttatccccaggaactagt

SEQ ID NO: 6118 - DNA, 25 bp, Homo sapiens
  source 1..25: mol_type = genomic DNA
gaactcttatccccaggaactagtt

SEQ ID NO: 6119 - DNA, 25 bp, Homo sapiens
  source 1..25: mol_type = genomic DNA
aactcttatccccaggaactagttt

SEQ ID NO: 6120 - DNA, 25 bp, Homo sapiens
  source 1..25: mol_type = genomic DNA
actcttatccccaggaactagtttg

SEQ ID NO: 6121 - DNA, 25 bp, Homo sapiens
  source 1..25: mol_type = genomic DNA
ctcttatccccaggaactagtttgt

SEQ ID NO: 6122 - DNA, 25 bp, Homo sapiens
  source 1..25: mol_type = genomic DNA
tcttatccccaggaactagtttgtt

SEQ ID NO: 6123 - DNA, 25 bp, Homo sapiens
  source 1..25: mol_type = genomic DNA
cttatccccaggaactagtttgttg

SEQ ID NO: 6124 - DNA, 25 bp, Homo sapiens
  source 1..25: mol_type = genomic DNA
ttatccccaggaactagtttgttga

SEQ ID NO: 6125 - DNA, 25 bp, Homo sapiens
  source 1..25: mol_type = genomic DNA
tatccccaggaactagtttgttgaa

SEQ ID NO: 6126 - DNA, 25 bp, Homo sapiens
  source 1..25: mol_type = genomic DNA
atccccaggaactagtttgttgaat

SEQ ID NO: 6127 - DNA, 25 bp, Homo sapiens
  source 1..25: mol_type = genomic DNA
tccccaggaactagtttgttgaata

SEQ ID NO: 6128 - DNA, 25 bp, Homo sapiens
  source 1..25: mol_type = genomic DNA
ccccaggaactagtttgttgaataa

SEQ ID NO: 6129 - DNA, 25 bp, Homo sapiens
  source 1..25: mol_type = genomic DNA
cccaggaactagtttgttgaataaa

SEQ ID NO: 6130 - DNA, 25 bp, Homo sapiens
  source 1..25: mol_type = genomic DNA
ccaggaactagtttgttgaataaat

SEQ ID NO: 6131 - DNA, 25 bp, Homo sapiens
  source 1..25: mol_type = genomic DNA
caggaactagtttgttgaataaatg

SEQ ID NO: 6132 - DNA, 25 bp, Homo sapiens
  source 1..25: mol_type = genomic DNA
aggaactagtttgttgaataaatgc

SEQ ID NO: 6133 - DNA, 25 bp, Homo sapiens
  source 1..25: mol_type = genomic DNA
ggaactagtttgttgaataaatgct

SEQ ID NO: 6134 - DNA, 25 bp, Homo sapiens
  source 1..25: mol_type = genomic DNA
gaactagtttgttgaataaatgctg

SEQ ID NO: 6135 - DNA, 25 bp, Homo sapiens
  source 1..25: mol_type = genomic DNA
aactagtttgttgaataaatgctgg

SEQ ID NO: 6136 - DNA, 25 bp, Homo sapiens
  source 1..25: mol_type = genomic DNA
actagtttgttgaataaatgctggt

SEQ ID NO: 6137 - DNA, 25 bp, Homo sapiens
  source 1..25: mol_type = genomic DNA
ctagtttgttgaataaatgctggtg

SEQ ID NO: 6138 - DNA, 25 bp, Homo sapiens
  source 1..25: mol_type = genomic DNA
tagtttgttgaataaatgctggtga

SEQ ID NO: 6139 - DNA, 25 bp, Homo sapiens
  source 1..25: mol_type = genomic DNA
agtttgttgaataaatgctggtgaa

SEQ ID NO: 6140 - DNA, 25 bp, Homo sapiens
  source 1..25: mol_type = genomic DNA
gtttgttgaataaatgctggtgaat

SEQ ID NO: 6141 - DNA, 25 bp, Homo sapiens
  source 1..25: mol_type = genomic DNA
tttgttgaataaatgctggtgaatg

SEQ ID NO: 6142 - DNA, 25 bp, Homo sapiens
  source 1..25: mol_type = genomic DNA
ttgttgaataaatgctggtgaatga

SEQ ID NO: 6143 - DNA, 25 bp, Homo sapiens
  source 1..25: mol_type = genomic DNA
tgttgaataaatgctggtgaatgaa

SEQ ID NO: 6144 - DNA, 25 bp, Homo sapiens
  source 1..25: mol_type = genomic DNA
gttgaataaatgctggtgaatgaat

SEQ ID NO: 6145 - DNA, 25 bp, Homo sapiens
  source 1..25: mol_type = genomic DNA
ttgaataaatgctggtgaatgaatg

SEQ ID NO: 6146 - DNA, 25 bp, Homo sapiens
  source 1..25: mol_type = genomic DNA
tgaataaatgctggtgaatgaatga

SEQ ID NO: 6147 - DNA, 25 bp, Homo sapiens
  source 1..25: mol_type = genomic DNA
gaataaatgctggtgaatgaatgaa

SEQ ID NO: 6148 - DNA, 25 bp, Homo sapiens
  source 1..25: mol_type = genomic DNA
aataaatgctggtgaatgaatgaat

SEQ ID NO: 6149 - DNA, 25 bp, Homo sapiens
  source 1..25: mol_type = genomic DNA
ataaatgctggtgaatgaatgaatg

SEQ ID NO: 6150 - DNA, 25 bp, Homo sapiens
  source 1..25: mol_type = genomic DNA
taaatgctggtgaatgaatgaatga

SEQ ID NO: 6151 - DNA, 25 bp, Homo sapiens
  source 1..25: mol_type = genomic DNA
aaatgctggtgaatgaatgaatgat

SEQ ID NO: 6152 - DNA, 25 bp, Homo sapiens
  source 1..25: mol_type = genomic DNA
aatgctggtgaatgaatgaatgatt

SEQ ID NO: 6153 - DNA, 25 bp, Homo sapiens
  source 1..25: mol_type = genomic DNA
atgctggtgaatgaatgaatgattg

SEQ ID NO: 6154 - DNA, 25 bp, Homo sapiens
  source 1..25: mol_type = genomic DNA
tgctggtgaatgaatgaatgattga

SEQ ID NO: 6155 - DNA, 25 bp, Homo sapiens
  source 1..25: mol_type = genomic DNA
gctggtgaatgaatgaatgattgaa

SEQ ID NO: 6156 - DNA, 25 bp, Homo sapiens
  source 1..25: mol_type = genomic DNA
ctggtgaatgaatgaatgattgaac

SEQ ID NO: 6157 - DNA, 25 bp, Homo sapiens
  source 1..25: mol_type = genomic DNA
tggtgaatgaatgaatgattgaaca

SEQ ID NO: 6158 - DNA, 25 bp, Homo sapiens
  source 1..25: mol_type = genomic DNA
ggtgaatgaatgaatgattgaacag

SEQ ID NO: 6159 - DNA, 25 bp, Homo sapiens
  source 1..25: mol_type = genomic DNA
gtgaatgaatgaatgattgaacaga

SEQ ID NO: 6160 - DNA, 25 bp, Homo sapiens
  source 1..25: mol_type = genomic DNA
tgaatgaatgaatgattgaacagat

SEQ ID NO: 6161 - DNA, 25 bp, Homo sapiens
  source 1..25: mol_type = genomic DNA
gaatgaatgaatgattgaacagatg

SEQ ID NO: 6162 - DNA, 25 bp, Homo sapiens
  source 1..25: mol_type = genomic DNA
aatgaatgaatgattgaacagatga

SEQ ID NO: 6163 - DNA, 25 bp, Homo sapiens
  source 1..25: mol_type = genomic DNA
atgaatgaatgattgaacagatgaa

SEQ ID NO: 6164 - DNA, 25 bp, Homo sapiens
  source 1..25: mol_type = genomic DNA
tgaatgaatgattgaacagatgaat

SEQ ID NO: 6165 - DNA, 25 bp, Homo sapiens
  source 1..25: mol_type = genomic DNA
gaatgaatgattgaacagatgaatg

SEQ ID NO: 6166 - DNA, 25 bp, Homo sapiens
  source 1..25: mol_type = genomic DNA
aatgaatgattgaacagatgaatga

SEQ ID NO: 6167 - DNA, 25 bp, Homo sapiens
  source 1..25: mol_type = genomic DNA
atgaatgattgaacagatgaatgag

SEQ ID NO: 6168 - DNA, 25 bp, Homo sapiens
  source 1..25: mol_type = genomic DNA
tgaatgattgaacagatgaatgagt

SEQ ID NO: 6169 - DNA, 25 bp, Homo sapiens
  source 1..25: mol_type = genomic DNA
gaatgattgaacagatgaatgagtg

SEQ ID NO: 6170 - DNA, 25 bp, Homo sapiens
  source 1..25: mol_type = genomic DNA
aatgattgaacagatgaatgagtga

SEQ ID NO: 6171 - DNA, 25 bp, Homo sapiens
  source 1..25: mol_type = genomic DNA
atgattgaacagatgaatgagtgat

SEQ ID NO: 6172 - DNA, 25 bp, Homo sapiens
  source 1..25: mol_type = genomic DNA
tgattgaacagatgaatgagtgatg

SEQ ID NO: 6173 - DNA, 25 bp, Homo sapiens
  source 1..25: mol_type = genomic DNA
gattgaacagatgaatgagtgatga

SEQ ID NO: 6174 - DNA, 25 bp, Homo sapiens
  source 1..25: mol_type = genomic DNA
attgaacagatgaatgagtgatgag

SEQ ID NO: 6175 - DNA, 25 bp, Homo sapiens
  source 1..25: mol_type = genomic DNA
ttgaacagatgaatgagtgatgagt

SEQ ID NO: 6176 - DNA, 25 bp, Homo sapiens
  source 1..25: mol_type = genomic DNA
tgaacagatgaatgagtgatgagta

SEQ ID NO: 6177 - DNA, 25 bp, Homo sapiens
  source 1..25: mol_type = genomic DNA
gaacagatgaatgagtgatgagtag

SEQ ID NO: 6178 - DNA, 25 bp, Homo sapiens
  source 1..25: mol_type = genomic DNA
aacagatgaatgagtgatgagtaga

SEQ ID NO: 6179 - DNA, 25 bp, Homo sapiens
  source 1..25: mol_type = genomic DNA
acagatgaatgagtgatgagtagat

SEQ ID NO: 6180 - DNA, 25 bp, Homo sapiens
  source 1..25: mol_type = genomic DNA
cagatgaatgagtgatgagtagata

SEQ ID NO: 6181 - DNA, 25 bp, Homo sapiens
  source 1..25: mol_type = genomic DNA
agatgaatgagtgatgagtagataa

SEQ ID NO: 6182 - DNA, 25 bp, Homo sapiens
  source 1..25: mol_type = genomic DNA
gatgaatgagtgatgagtagataaa

SEQ ID NO: 6183 - DNA, 25 bp, Homo sapiens
  source 1..25: mol_type = genomic DNA
atgaatgagtgatgagtagataaaa

SEQ ID NO: 6184 - DNA, 25 bp, Homo sapiens
  source 1..25: mol_type = genomic DNA
tgaatgagtgatgagtagataaaag

SEQ ID NO: 6185 - DNA, 25 bp, Homo sapiens
  source 1..25: mol_type = genomic DNA
gaatgagtgatgagtagataaaagg

SEQ ID NO: 6186 - DNA, 25 bp, Homo sapiens
  source 1..25: mol_type = genomic DNA
aatgagtgatgagtagataaaagga

SEQ ID NO: 6187 - DNA, 25 bp, Homo sapiens
  source 1..25: mol_type = genomic DNA
atgagtgatgagtagataaaaggat

SEQ ID NO: 6188 - DNA, 25 bp, Homo sapiens
  source 1..25: mol_type = genomic DNA
tgagtgatgagtagataaaaggatg

SEQ ID NO: 6189 - DNA, 25 bp, Homo sapiens
  source 1..25: mol_type = genomic DNA
gagtgatgagtagataaaaggatgg

SEQ ID NO: 6190 - DNA, 25 bp, Homo sapiens
  source 1..25: mol_type = genomic DNA
agtgatgagtagataaaaggatgga

SEQ ID NO: 6191 - DNA, 25 bp, Homo sapiens
  source 1..25: mol_type = genomic DNA
gtgatgagtagataaaaggatggat

SEQ ID NO: 6192 - DNA, 25 bp, Homo sapiens
  source 1..25: mol_type = genomic DNA
tgatgagtagataaaaggatggatg

SEQ ID NO: 6193 - DNA, 25 bp, Homo sapiens
  source 1..25: mol_type = genomic DNA
gatgagtagataaaaggatggatgg

SEQ ID NO: 6194 - DNA, 25 bp, Homo sapiens
  source 1..25: mol_type = genomic DNA
atgagtagataaaaggatggatgga

SEQ ID NO: 6195 - DNA, 25 bp, Homo sapiens
  source 1..25: mol_type = genomic DNA
tgagtagataaaaggatggatggag

SEQ ID NO: 6196 - DNA, 25 bp, Homo sapiens
  source 1..25: mol_type = genomic DNA
gagtagataaaaggatggatggaga

SEQ ID NO: 6197 - DNA, 25 bp, Homo sapiens
  source 1..25: mol_type = genomic DNA
agtagataaaaggatggatggagag

SEQ ID NO: 6198 - DNA, 25 bp, Homo sapiens
  source 1..25: mol_type = genomic DNA
gtagataaaaggatggatggagaga

SEQ ID NO: 6199 - DNA, 25 bp, Homo sapiens
  source 1..25: mol_type = genomic DNA
tagataaaaggatggatggagagat

SEQ ID NO: 6200 - DNA, 25 bp, Homo sapiens
  source 1..25: mol_type = genomic DNA
agataaaaggatggatggagagatg

SEQ ID NO: 6201 - DNA, 25 bp, Homo sapiens
  source 1..25: mol_type = genomic DNA
gataaaaggatggatggagagatgg

SEQ ID NO: 6202 - DNA, 25 bp, Homo sapiens
  source 1..25: mol_type = genomic DNA
ataaaaggatggatggagagatggg

SEQ ID NO: 6203 - DNA, 25 bp, Homo sapiens
  source 1..25: mol_type = genomic DNA
taaaaggatggatggagagatgggt

SEQ ID NO: 6204 - DNA, 25 bp, Homo sapiens
  source 1..25: mol_type = genomic DNA
aaaaggatggatggagagatgggtg

SEQ ID NO: 6205 - DNA, 25 bp, Homo sapiens
  source 1..25: mol_type = genomic DNA
aaaggatggatggagagatgggtga

SEQ ID NO: 6206 - DNA, 25 bp, Homo sapiens
  source 1..25: mol_type = genomic DNA
aaggatggatggagagatgggtgag

SEQ ID NO: 6207 - DNA, 25 bp, Homo sapiens
  source 1..25: mol_type = genomic DNA
aggatggatggagagatgggtgagt

SEQ ID NO: 6208 - DNA, 25 bp, Homo sapiens
  source 1..25: mol_type = genomic DNA
ggatggatggagagatgggtgagta

SEQ ID NO: 6209 - DNA, 25 bp, Homo sapiens
  source 1..25: mol_type = genomic DNA
gatggatggagagatgggtgagtac

SEQ ID NO: 6210 - DNA, 25 bp, Homo sapiens
  source 1..25: mol_type = genomic DNA
atggatggagagatgggtgagtaca

SEQ ID NO: 6211 - DNA, 25 bp, Homo sapiens
  source 1..25: mol_type = genomic DNA
tggatggagagatgggtgagtacat

SEQ ID NO: 6212 - DNA, 25 bp, Homo sapiens
  source 1..25: mol_type = genomic DNA
ggatggagagatgggtgagtacatg

SEQ ID NO: 6213 - DNA, 25 bp, Homo sapiens
  source 1..25: mol_type = genomic DNA
gatggagagatgggtgagtacatgg

SEQ ID NO: 6214 - DNA, 25 bp, Homo sapiens
  source 1..25: mol_type = genomic DNA
atggagagatgggtgagtacatgga

SEQ ID NO: 6215 - DNA, 25 bp, Homo sapiens
  source 1..25: mol_type = genomic DNA
tggagagatgggtgagtacatggat

SEQ ID NO: 6216 - DNA, 25 bp, Homo sapiens
  source 1..25: mol_type = genomic DNA
ggagagatgggtgagtacatggatg

SEQ ID NO: 6217 - DNA, 25 bp, Homo sapiens
  source 1..25: mol_type = genomic DNA
gagagatgggtgagtacatggatgg

SEQ ID NO: 6218 - DNA, 25 bp, Homo sapiens
  source 1..25: mol_type = genomic DNA
agagatgggtgagtacatggatgga

SEQ ID NO: 6219 - DNA, 25 bp, Homo sapiens
  source 1..25: mol_type = genomic DNA
gagatgggtgagtacatggatggat

SEQ ID NO: 6220 - DNA, 25 bp, Homo sapiens
  source 1..25: mol_type = genomic DNA
agatgggtgagtacatggatggata

SEQ ID NO: 6221 - DNA, 25 bp, Homo sapiens
  source 1..25: mol_type = genomic DNA
gatgggtgagtacatggatggatag

SEQ ID NO: 6222 - DNA, 25 bp, Homo sapiens
  source 1..25: mol_type = genomic DNA
atgggtgagtacatggatggataga

SEQ ID NO: 6223 - DNA, 25 bp, Homo sapiens
  source 1..25: mol_type = genomic DNA
tgggtgagtacatggatggatagat

SEQ ID NO: 6224 - DNA, 25 bp, Homo sapiens
  source 1..25: mol_type = genomic DNA
gggtgagtacatggatggatagatg

SEQ ID NO: 6225 - DNA, 25 bp, Homo sapiens
  source 1..25: mol_type = genomic DNA
ggtgagtacatggatggatagatgg

SEQ ID NO: 6226 - DNA, 25 bp, Homo sapiens
  source 1..25: mol_type = genomic DNA
gtgagtacatggatggatagatgga

SEQ ID NO: 6227 - DNA, 25 bp, Homo sapiens
  source 1..25: mol_type = genomic DNA
tgagtacatggatggatagatggat

SEQ ID NO: 6228 - DNA, 25 bp, Homo sapiens
  source 1..25: mol_type = genomic DNA
gagtacatggatggatagatggatg

SEQ ID NO: 6229 - DNA, 25 bp, Homo sapiens
  source 1..25: mol_type = genomic DNA
agtacatggatggatagatggatga

SEQ ID NO: 6230 - DNA, 25 bp, Homo sapiens
  source 1..25: mol_type = genomic DNA
gtacatggatggatagatggatgag

SEQ ID NO: 6231 - DNA, 25 bp, Homo sapiens
  source 1..25: mol_type = genomic DNA
tacatggatggatagatggatgagt

SEQ ID NO: 6232 - DNA, 25 bp, Homo sapiens
  source 1..25: mol_type = genomic DNA
acatggatggatagatggatgagtt

SEQ ID NO: 6233 - DNA, 25 bp, Homo sapiens
  source 1..25: mol_type = genomic DNA
catggatggatagatggatgagttg

SEQ ID NO: 6234 - DNA, 25 bp, Homo sapiens
  source 1..25: mol_type = genomic DNA
atggatggatagatggatgagttgg

SEQ ID NO: 6235 - DNA, 25 bp, Homo sapiens
  source 1..25: mol_type = genomic DNA
tggatggatagatggatgagttggt

SEQ ID NO: 6236 - DNA, 25 bp, Homo sapiens
  source 1..25: mol_type = genomic DNA
ggatggatagatggatgagttggtg

SEQ ID NO: 6237 - DNA, 25 bp, Homo sapiens
  source 1..25: mol_type = genomic DNA
gatggatagatggatgagttggtgg

SEQ ID NO: 6238 - DNA, 25 bp, Homo sapiens
  source 1..25: mol_type = genomic DNA
atggatagatggatgagttggtggg

SEQ ID NO: 6239 - DNA, 25 bp, Homo sapiens
  source 1..25: mol_type = genomic DNA
tggatagatggatgagttggtgggt

SEQ ID NO: 6240 - DNA, 25 bp, Homo sapiens
  source 1..25: mol_type = genomic DNA
ggatagatggatgagttggtgggta

SEQ ID NO: 6241 - DNA, 25 bp, Homo sapiens
  source 1..25: mol_type = genomic DNA
gatagatggatgagttggtgggtag

SEQ ID NO: 6242 - DNA, 25 bp, Homo sapiens
  source 1..25: mol_type = genomic DNA
atagatggatgagttggtgggtaga

SEQ ID NO: 6243 - DNA, 25 bp, Homo sapiens
  source 1..25: mol_type = genomic DNA
tagatggatgagttggtgggtagat

SEQ ID NO: 6244 - DNA, 25 bp, Homo sapiens
  source 1..25: mol_type = genomic DNA
agatggatgagttggtgggtagatt

SEQ ID NO: 6245 - DNA, 25 bp, Homo sapiens
  source 1..25: mol_type = genomic DNA
gatggatgagttggtgggtagattc

SEQ ID NO: 6246 - DNA, 25 bp, Homo sapiens
  source 1..25: mol_type = genomic DNA
atggatgagttggtgggtagattcg

SEQ ID NO: 6247 - DNA, 25 bp, Homo sapiens
  source 1..25: mol_type = genomic DNA
tggatgagttggtgggtagattcgt

SEQ ID NO: 6248 - DNA, 25 bp, Homo sapiens
  source 1..25: mol_type = genomic DNA
ggatgagttggtgggtagattcgtg

SEQ ID NO: 6249 - DNA, 25 bp, Homo sapiens
  source 1..25: mol_type = genomic DNA
gatgagttggtgggtagattcgtgg

SEQ ID NO: 6250 - DNA, 25 bp, Homo sapiens
  source 1..25: mol_type = genomic DNA
atgagttggtgggtagattcgtggc

SEQ ID NO: 6251 - DNA, 25 bp, Homo sapiens
  source 1..25: mol_type = genomic DNA
tgagttggtgggtagattcgtggct

SEQ ID NO: 6252 - DNA, 25 bp, Homo sapiens
  source 1..25: mol_type = genomic DNA
gagttggtgggtagattcgtggcta

SEQ ID NO: 6253 - DNA, 25 bp, Homo sapiens
  source 1..25: mol_type = genomic DNA
agttggtgggtagattcgtggctag

SEQ ID NO: 6254 - DNA, 25 bp, Homo sapiens
  source 1..25: mol_type = genomic DNA
gttggtgggtagattcgtggctaga

SEQ ID NO: 6255 - DNA, 25 bp, Homo sapiens
  source 1..25: mol_type = genomic DNA
ttggtgggtagattcgtggctagat

SEQ ID NO: 6256 - DNA, 25 bp, Homo sapiens
  source 1..25: mol_type = genomic DNA
tggtgggtagattcgtggctagatg

SEQ ID NO: 6257 - DNA, 25 bp, Homo sapiens
  source 1..25: mol_type = genomic DNA
ggtgggtagattcgtggctagatgg

SEQ ID NO: 6258 - DNA, 25 bp, Homo sapiens
  source 1..25: mol_type = genomic DNA
gtgggtagattcgtggctagatgga

SEQ ID NO: 6259 - DNA, 25 bp, Homo sapiens
  source 1..25: mol_type = genomic DNA
tgggtagattcgtggctagatggat

SEQ ID NO: 6260 - DNA, 25 bp, Homo sapiens
  source 1..25: mol_type = genomic DNA
gggtagattcgtggctagatggatg

SEQ ID NO: 6261 - DNA, 25 bp, Homo sapiens
  source 1..25: mol_type = genomic DNA
ggtagattcgtggctagatggatga

SEQ ID NO: 6262 - DNA, 25 bp, Homo sapiens
  source 1..25: mol_type = genomic DNA
gtagattcgtggctagatggatgat

SEQ ID NO: 6263 - DNA, 25 bp, Homo sapiens
  source 1..25: mol_type = genomic DNA
tagattcgtggctagatggatgatg

SEQ ID NO: 6264 - DNA, 25 bp, Homo sapiens
  source 1..25: mol_type = genomic DNA
agattcgtggctagatggatgatgg

SEQ ID NO: 6265 - DNA, 25 bp, Homo sapiens
  source 1..25: mol_type = genomic DNA
gattcgtggctagatggatgatgga

SEQ ID NO: 6266 - DNA, 25 bp, Homo sapiens
  source 1..25: mol_type = genomic DNA
attcgtggctagatggatgatggat

SEQ ID NO: 6267 - DNA, 25 bp, Homo sapiens
  source 1..25: mol_type = genomic DNA
ttcgtggctagatggatgatggatg

SEQ ID NO: 6268 - DNA, 25 bp, Homo sapiens
  source 1..25: mol_type = genomic DNA
tcgtggctagatggatgatggatgg

SEQ ID NO: 6269 - DNA, 25 bp, Homo sapiens
  source 1..25: mol_type = genomic DNA
cgtggctagatggatgatggatgga

SEQ ID NO: 6270 - DNA, 25 bp, Homo sapiens
  source 1..25: mol_type = genomic DNA
gtggctagatggatgatggatggat

SEQ ID NO: 6271 - DNA, 25 bp, Homo sapiens
  source 1..25: mol_type = genomic DNA
tggctagatggatgatggatggatg

SEQ ID NO: 6272 - DNA, 25 bp, Homo sapiens
  source 1..25: mol_type = genomic DNA
ggctagatggatgatggatggatgg

SEQ ID NO: 6273 - DNA, 25 bp, Homo sapiens
  source 1..25: mol_type = genomic DNA
gctagatggatgatggatggatgga

SEQ ID NO: 6274 - DNA, 25 bp, Homo sapiens
  source 1..25: mol_type = genomic DNA
ctagatggatgatggatggatggac

SEQ ID NO: 6275 - DNA, 25 bp, Homo sapiens
  source 1..25: mol_type = genomic DNA
tagatggatgatggatggatggaca

SEQ ID NO: 6276 - DNA, 25 bp, Homo sapiens
  source 1..25: mol_type = genomic DNA
agatggatgatggatggatggacag

SEQ ID NO: 6277 - DNA, 25 bp, Homo sapiens
  source 1..25: mol_type = genomic DNA
gatggatgatggatggatggacaga

SEQ ID NO: 6278 - DNA, 25 bp, Homo sapiens
  source 1..25: mol_type = genomic DNA
atggatgatggatggatggacagat

SEQ ID NO: 6279 - DNA, 25 bp, Homo sapiens
  source 1..25: mol_type = genomic DNA
tggatgatggatggatggacagatg

SEQ ID NO: 6280 - DNA, 25 bp, Homo sapiens
  source 1..25: mol_type = genomic DNA
ggatgatggatggatggacagatgg

SEQ ID NO: 6281 - DNA, 25 bp, Homo sapiens
  source 1..25: mol_type = genomic DNA
gatgatggatggatggacagatgga

SEQ ID NO: 6282 - DNA, 25 bp, Homo sapiens
  source 1..25: mol_type = genomic DNA
atgatggatggatggacagatggat

SEQ ID NO: 6283 - DNA, 25 bp, Homo sapiens
  source 1..25: mol_type = genomic DNA
tgatggatggatggacagatggatg

SEQ ID NO: 6284 - DNA, 25 bp, Homo sapiens
  source 1..25: mol_type = genomic DNA
gatggatggatggacagatggatgg

SEQ ID NO: 6285 - DNA, 25 bp, Homo sapiens
  source 1..25: mol_type = genomic DNA
atggatggatggacagatggatgga

SEQ ID NO: 6286 - DNA, 25 bp, Homo sapiens
  source 1..25: mol_type = genomic DNA
tggatggatggacagatggatggat

SEQ ID NO: 6287 - DNA, 25 bp, Homo sapiens
  source 1..25: mol_type = genomic DNA
ggatggatggacagatggatggata

SEQ ID NO: 6288 - DNA, 25 bp, Homo sapiens
  source 1..25: mol_type = genomic DNA
gatggatggacagatggatggatat

SEQ ID NO: 6289 - DNA, 25 bp, Homo sapiens
  source 1..25: mol_type = genomic DNA
atggatggacagatggatggatata

SEQ ID NO: 6290 - DNA, 25 bp, Homo sapiens
  source 1..25: mol_type = genomic DNA
tggatggacagatggatggatatat

SEQ ID NO: 6291 - DNA, 25 bp, Homo sapiens
  source 1..25: mol_type = genomic DNA
ggatggacagatggatggatatatg

SEQ ID NO: 6292 - DNA, 25 bp, Homo sapiens
  source 1..25: mol_type = genomic DNA
gatggacagatggatggatatatga

SEQ ID NO: 6293 - DNA, 25 bp, Homo sapiens
  source 1..25: mol_type = genomic DNA
atggacagatggatggatatatgat

SEQ ID NO: 6294 - DNA, 25 bp, Homo sapiens
  source 1..25: mol_type = genomic DNA
tggacagatggatggatatatgatt

SEQ ID NO: 6295 - DNA, 25 bp, Homo sapiens
  source 1..25: mol_type = genomic DNA
ggacagatggatggatatatgattg

SEQ ID NO: 6296 - DNA, 25 bp, Homo sapiens
  source 1..25: mol_type = genomic DNA
gacagatggatggatatatgattga

SEQ ID NO: 6297 - DNA, 25 bp, Homo sapiens
  source 1..25: mol_type = genomic DNA
acagatggatggatatatgattgaa

SEQ ID NO: 6298 - DNA, 25 bp, Homo sapiens
  source 1..25: mol_type = genomic DNA
cagatggatggatatatgattgaac

SEQ ID NO: 6299 - DNA, 25 bp, Homo sapiens
  source 1..25: mol_type = genomic DNA
agatggatggatatatgattgaact

SEQ ID NO: 6300 - DNA, 25 bp, Homo sapiens
  source 1..25: mol_type = genomic DNA
gatggatggatatatgattgaacta

SEQ ID NO: 6301 - DNA, 25 bp, Homo sapiens
  source 1..25: mol_type = genomic DNA
atggatggatatatgattgaactat

SEQ ID NO: 6302 - DNA, 25 bp, Homo sapiens
  source 1..25: mol_type = genomic DNA
tggatggatatatgattgaactatt

SEQ ID NO: 6303 - DNA, 25 bp, Homo sapiens
  source 1..25: mol_type = genomic DNA
ggatggatatatgattgaactattg

SEQ ID NO: 6304 - DNA, 25 bp, Homo sapiens
  source 1..25: mol_type = genomic DNA
gatggatatatgattgaactattga

SEQ ID NO: 6305 - DNA, 25 bp, Homo sapiens
  source 1..25: mol_type = genomic DNA
atggatatatgattgaactattgaa

SEQ ID NO: 6306 - DNA, 25 bp, Homo sapiens
  source 1..25: mol_type = genomic DNA
tggatatatgattgaactattgaaa

SEQ ID NO: 6307 - DNA, 25 bp, Homo sapiens
  source 1..25: mol_type = genomic DNA
ggatatatgattgaactattgaaag

SEQ ID NO: 6308 - DNA, 25 bp, Homo sapiens
  source 1..25: mol_type = genomic DNA
gatatatgattgaactattgaaagt

SEQ ID NO: 6309 - DNA, 25 bp, Homo sapiens
  source 1..25: mol_type = genomic DNA
atatatgattgaactattgaaagta

SEQ ID NO: 6310 - DNA, 25 bp, Homo sapiens
  source 1..25: mol_type = genomic DNA
tatatgattgaactattgaaagtat

SEQ ID NO: 6311 - DNA, 25 bp, Homo sapiens
  source 1..25: mol_type = genomic DNA
atatgattgaactattgaaagtata

SEQ ID NO: 6312 - DNA, 25 bp, Homo sapiens
  source 1..25: mol_type = genomic DNA
tatgattgaactattgaaagtatag

SEQ ID NO: 6313 - DNA, 25 bp, Homo sapiens
  source 1..25: mol_type = genomic DNA
atgattgaactattgaaagtataga

SEQ ID NO: 6314 - DNA, 25 bp, Homo sapiens
  source 1..25: mol_type = genomic DNA
tgattgaactattgaaagtatagat

SEQ ID NO: 6315 - DNA, 25 bp, Homo sapiens
  source 1..25: mol_type = genomic DNA
gattgaactattgaaagtatagatg

SEQ ID NO: 6316 - DNA, 25 bp, Homo sapiens
  source 1..25: mol_type = genomic DNA
attgaactattgaaagtatagatgt

SEQ ID NO: 6317 - DNA, 25 bp, Homo sapiens
  source 1..25: mol_type = genomic DNA
ttgaactattgaaagtatagatgta

SEQ ID NO: 6318 - DNA, 25 bp, Homo sapiens
  source 1..25: mol_type = genomic DNA
tgaactattgaaagtatagatgtat

SEQ ID NO: 6319 - DNA, 25 bp, Homo sapiens
  source 1..25: mol_type = genomic DNA
gaactattgaaagtatagatgtatg

SEQ ID NO: 6320 - DNA, 25 bp, Homo sapiens
  source 1..25: mol_type = genomic DNA
aactattgaaagtatagatgtatgg

SEQ ID NO: 6321 - DNA, 25 bp, Homo sapiens
  source 1..25: mol_type = genomic DNA
actattgaaagtatagatgtatgga

SEQ ID NO: 6322 - DNA, 25 bp, Homo sapiens
  source 1..25: mol_type = genomic DNA
ctattgaaagtatagatgtatggat

SEQ ID NO: 6323 - DNA, 25 bp, Homo sapiens
  source 1..25: mol_type = genomic DNA
tattgaaagtatagatgtatggatg

SEQ ID NO: 6324 - DNA, 25 bp, Homo sapiens
  source 1..25: mol_type = genomic DNA
attgaaagtatagatgtatggatgg

SEQ ID NO: 6325 - DNA, 25 bp, Homo sapiens
  source 1..25: mol_type = genomic DNA
ttgaaagtatagatgtatggatggg

SEQ ID NO: 6326 - DNA, 25 bp, Homo sapiens
  source 1..25: mol_type = genomic DNA
tgaaagtatagatgtatggatgggt

SEQ ID NO: 6327 - DNA, 25 bp, Homo sapiens
  source 1..25: mol_type = genomic DNA
gaaagtatagatgtatggatgggtg

SEQ ID NO: 6328 - DNA, 25 bp, Homo sapiens
  source 1..25: mol_type = genomic DNA
aaagtatagatgtatggatgggtga

SEQ ID NO: 6329 - DNA, 25 bp, Homo sapiens
  source 1..25: mol_type = genomic DNA
aagtatagatgtatggatgggtgaa

SEQ ID NO: 6330 - DNA, 25 bp, Homo sapiens
  source 1..25: mol_type = genomic DNA
agtatagatgtatggatgggtgaat

SEQ ID NO: 6331 - DNA, 25 bp, Homo sapiens
  source 1..25: mol_type = genomic DNA
gtatagatgtatggatgggtgaatt

SEQ ID NO: 6332 - DNA, 25 bp, Homo sapiens
  source 1..25: mol_type = genomic DNA
tatagatgtatggatgggtgaattt

SEQ ID NO: 6333 - DNA, 25 bp, Homo sapiens
  source 1..25: mol_type = genomic DNA
atagatgtatggatgggtgaatttg

SEQ ID NO: 6334 - DNA, 25 bp, Homo sapiens
  source 1..25: mol_type = genomic DNA
tagatgtatggatgggtgaatttgg

SEQ ID NO: 6335 - DNA, 25 bp, Homo sapiens
  source 1..25: mol_type = genomic DNA
agatgtatggatgggtgaatttggg

SEQ ID NO: 6336 - DNA, 25 bp, Homo sapiens
  source 1..25: mol_type = genomic DNA
gatgtatggatgggtgaatttgggg

SEQ ID NO: 6337 - DNA, 25 bp, Homo sapiens
  source 1..25: mol_type = genomic DNA
atgtatggatgggtgaatttggggg

SEQ ID NO: 6338 - DNA, 25 bp, Homo sapiens
  source 1..25: mol_type = genomic DNA
tgtatggatgggtgaatttgggggt

SEQ ID NO: 6339 - DNA, 25 bp, Homo sapiens
  source 1..25: mol_type = genomic DNA
gtatggatgggtgaatttgggggta

SEQ ID NO: 6340 - DNA, 25 bp, Homo sapiens
  source 1..25: mol_type = genomic DNA
tatggatgggtgaatttgggggtaa

SEQ ID NO: 6341 - DNA, 25 bp, Homo sapiens
  source 1..25: mol_type = genomic DNA
atggatgggtgaatttgggggtaat

SEQ ID NO: 6342 - DNA, 25 bp, Homo sapiens
  source 1..25: mol_type = genomic DNA
tggatgggtgaatttgggggtaatt

SEQ ID NO: 6343 - DNA, 25 bp, Homo sapiens
  source 1..25: mol_type = genomic DNA
ggatgggtgaatttgggggtaattg

SEQ ID NO: 6344 - DNA, 25 bp, Homo sapiens
  source 1..25: mol_type = genomic DNA
gatgggtgaatttgggggtaattgt

SEQ ID NO: 6345 - DNA, 25 bp, Homo sapiens
  source 1..25: mol_type = genomic DNA
atgggtgaatttgggggtaattgtt

SEQ ID NO: 6346 - DNA, 25 bp, Homo sapiens
  source 1..25: mol_type = genomic DNA
tgggtgaatttgggggtaattgtta

SEQ ID NO: 6347 - DNA, 25 bp, Homo sapiens
  source 1..25: mol_type = genomic DNA
gggtgaatttgggggtaattgttag

SEQ ID NO: 6348 - DNA, 25 bp, Homo sapiens
  source 1..25: mol_type = genomic DNA
ggtgaatttgggggtaattgttaga

SEQ ID NO: 6349 - DNA, 25 bp, Homo sapiens
  source 1..25: mol_type = genomic DNA
gtgaatttgggggtaattgttagat

SEQ ID NO: 6350 - DNA, 25 bp, Homo sapiens
  source 1..25: mol_type = genomic DNA
tgaatttgggggtaattgttagatg

SEQ ID NO: 6351 - DNA, 25 bp, Homo sapiens
  source 1..25: mol_type = genomic DNA
gaatttgggggtaattgttagatga

SEQ ID NO: 6352 - DNA, 25 bp, Homo sapiens
  source 1..25: mol_type = genomic DNA
aatttgggggtaattgttagatgat

SEQ ID NO: 6353 - DNA, 25 bp, Homo sapiens
  source 1..25: mol_type = genomic DNA
atttgggggtaattgttagatgatg

SEQ ID NO: 6354 - DNA, 25 bp, Homo sapiens
  source 1..25: mol_type = genomic DNA
tttgggggtaattgttagatgatgg

SEQ ID NO: 6355 - DNA, 25 bp, Homo sapiens
  source 1..25: mol_type = genomic DNA
ttgggggtaattgttagatgatgga

SEQ ID NO: 6356 - DNA, 25 bp, Homo sapiens
  source 1..25: mol_type = genomic DNA
tgggggtaattgttagatgatggat

SEQ ID NO: 6357 - DNA, 25 bp, Homo sapiens
  source 1..25: mol_type = genomic DNA
gggggtaattgttagatgatggatg

SEQ ID NO: 6358 - DNA, 25 bp, Homo sapiens
  source 1..25: mol_type = genomic DNA
ggggtaattgttagatgatggatga

SEQ ID NO: 6359 - DNA, 25 bp, Homo sapiens
  source 1..25: mol_type = genomic DNA
gggtaattgttagatgatggatgag

SEQ ID NO: 6360 - DNA, 25 bp, Homo sapiens
  source 1..25: mol_type = genomic DNA
ggtaattgttagatgatggatgagt

SEQ ID NO: 6361 - DNA, 25 bp, Homo sapiens
  source 1..25: mol_type = genomic DNA
gtaattgttagatgatggatgagta

SEQ ID NO: 6362 - DNA, 25 bp, Homo sapiens
  source 1..25: mol_type = genomic DNA
taattgttagatgatggatgagtat

SEQ ID NO: 6363 - DNA, 25 bp, Homo sapiens
  source 1..25: mol_type = genomic DNA
aattgttagatgatggatgagtata

SEQ ID NO: 6364 - DNA, 25 bp, Homo sapiens
  source 1..25: mol_type = genomic DNA
attgttagatgatggatgagtatag

SEQ ID NO: 6365 - DNA, 25 bp, Homo sapiens
  source 1..25: mol_type = genomic DNA
ttgttagatgatggatgagtataga

SEQ ID NO: 6366 - DNA, 25 bp, Homo sapiens
  source 1..25: mol_type = genomic DNA
tgttagatgatggatgagtatagat

SEQ ID NO: 6367 - DNA, 25 bp, Homo sapiens
  source 1..25: mol_type = genomic DNA
gttagatgatggatgagtatagatg

SEQ ID NO: 6368 - DNA, 25 bp, Homo sapiens
  source 1..25: mol_type = genomic DNA
ttagatgatggatgagtatagatga

SEQ ID NO: 6369 - DNA, 25 bp, Homo sapiens
  source 1..25: mol_type = genomic DNA
tagatgatggatgagtatagatgaa

SEQ ID NO: 6370 - DNA, 25 bp, Homo sapiens
  source 1..25: mol_type = genomic DNA
agatgatggatgagtatagatgaat

SEQ ID NO: 6371 - DNA, 25 bp, Homo sapiens
  source 1..25: mol_type = genomic DNA
gatgatggatgagtatagatgaatg

SEQ ID NO: 6372 - DNA, 25 bp, Homo sapiens
  source 1..25: mol_type = genomic DNA
atgatggatgagtatagatgaatga

SEQ ID NO: 6373 - DNA, 25 bp, Homo sapiens
  source 1..25: mol_type = genomic DNA
tgatggatgagtatagatgaatgat

SEQ ID NO: 6374 - DNA, 25 bp, Homo sapiens
  source 1..25: mol_type = genomic DNA
gatggatgagtatagatgaatgatg

SEQ ID NO: 6375 - DNA, 25 bp, Homo sapiens
  source 1..25: mol_type = genomic DNA
atggatgagtatagatgaatgatgg

SEQ ID NO: 6376 - DNA, 25 bp, Homo sapiens
  source 1..25: mol_type = genomic DNA
tggatgagtatagatgaatgatgga

SEQ ID NO: 6377 - DNA, 25 bp, Homo sapiens
  source 1..25: mol_type = genomic DNA
ggatgagtatagatgaatgatggat

SEQ ID NO: 6378 - DNA, 25 bp, Homo sapiens
  source 1..25: mol_type = genomic DNA
gatgagtatagatgaatgatggatg

SEQ ID NO: 6379 - DNA, 25 bp, Homo sapiens
  source 1..25: mol_type = genomic DNA
atgagtatagatgaatgatggatgg

SEQ ID NO: 6380 - DNA, 25 bp, Homo sapiens
  source 1..25: mol_type = genomic DNA
tgagtatagatgaatgatggatgga

SEQ ID NO: 6381 - DNA, 25 bp, Homo sapiens
  source 1..25: mol_type = genomic DNA
gagtatagatgaatgatggatggat

SEQ ID NO: 6382 - DNA, 25 bp, Homo sapiens
  source 1..25: mol_type = genomic DNA
agtatagatgaatgatggatggata

SEQ ID NO: 6383 - DNA, 25 bp, Homo sapiens
  source 1..25: mol_type = genomic DNA
gtatagatgaatgatggatggataa

SEQ ID NO: 6384 - DNA, 25 bp, Homo sapiens
  source 1..25: mol_type = genomic DNA
tatagatgaatgatggatggataac

SEQ ID NO: 6385 - DNA, 25 bp, Homo sapiens
  source 1..25: mol_type = genomic DNA
atagatgaatgatggatggataact

SEQ ID NO: 6386 - DNA, 25 bp, Homo sapiens
  source 1..25: mol_type = genomic DNA
tagatgaatgatggatggataactt

SEQ ID NO: 6387 - DNA, 25 bp, Homo sapiens
  source 1..25: mol_type = genomic DNA
agatgaatgatggatggataacttg

SEQ ID NO: 6388 - DNA, 25 bp, Homo sapiens
  source 1..25: mol_type = genomic DNA
gatgaatgatggatggataacttga

SEQ ID NO: 6389 - DNA, 25 bp, Homo sapiens
  source 1..25: mol_type = genomic DNA
atgaatgatggatggataacttgat

SEQ ID NO: 6390 - DNA, 25 bp, Homo sapiens
  source 1..25: mol_type = genomic DNA
tgaatgatggatggataacttgatg

SEQ ID NO: 6391 - DNA, 25 bp, Homo sapiens
  source 1..25: mol_type = genomic DNA
gaatgatggatggataacttgatga

SEQ ID NO: 6392 - DNA, 25 bp, Homo sapiens
  source 1..25: mol_type = genomic DNA
aatgatggatggataacttgatgag

SEQ ID NO: 6393 - DNA, 25 bp, Homo sapiens
  source 1..25: mol_type = genomic DNA
atgatggatggataacttgatgagt

SEQ ID NO: 6394 - DNA, 25 bp, Homo sapiens
  source 1..25: mol_type = genomic DNA
tgatggatggataacttgatgagtg

SEQ ID NO: 6395 - DNA, 25 bp, Homo sapiens
  source 1..25: mol_type = genomic DNA
gatggatggataacttgatgagtgg

SEQ ID NO: 6396 - DNA, 25 bp, Homo sapiens
  source 1..25: mol_type = genomic DNA
atggatggataacttgatgagtgga

SEQ ID NO: 6397 - DNA, 25 bp, Homo sapiens
  source 1..25: mol_type = genomic DNA
tggatggataacttgatgagtggat

SEQ ID NO: 6398 - DNA, 25 bp, Homo sapiens
  source 1..25: mol_type = genomic DNA
ggatggataacttgatgagtggata

SEQ ID NO: 6399 - DNA, 25 bp, Homo sapiens
  source 1..25: mol_type = genomic DNA
gatggataacttgatgagtggatag

SEQ ID NO: 6400 - DNA, 25 bp, Homo sapiens
  source 1..25: mol_type = genomic DNA
atggataacttgatgagtggataga

SEQ ID NO: 6401 - DNA, 25 bp, Homo sapiens
  source 1..25: mol_type = genomic DNA
tggataacttgatgagtggatagat

SEQ ID NO: 6402 - DNA, 25 bp, Homo sapiens
  source 1..25: mol_type = genomic DNA
ggataacttgatgagtggatagata

SEQ ID NO: 6403 - DNA, 25 bp, Homo sapiens
  source 1..25: mol_type = genomic DNA
gataacttgatgagtggatagatag

SEQ ID NO: 6404 - DNA, 25 bp, Homo sapiens
  source 1..25: mol_type = genomic DNA
ataacttgatgagtggatagataga

SEQ ID NO: 6405 - DNA, 25 bp, Homo sapiens
  source 1..25: mol_type = genomic DNA
taacttgatgagtggatagatagat

SEQ ID NO: 6406 - DNA, 25 bp, Homo sapiens
  source 1..25: mol_type = genomic DNA
aacttgatgagtggatagatagatt

SEQ ID NO: 6407 - DNA, 25 bp, Homo sapiens
  source 1..25: mol_type = genomic DNA
acttgatgagtggatagatagattg

SEQ ID NO: 6408 - DNA, 25 bp, Homo sapiens
  source 1..25: mol_type = genomic DNA
cttgatgagtggatagatagattgc

SEQ ID NO: 6409 - DNA, 25 bp, Homo sapiens
  source 1..25: mol_type = genomic DNA
ttgatgagtggatagatagattgct

SEQ ID NO: 6410 - DNA, 25 bp, Homo sapiens
  source 1..25: mol_type = genomic DNA
tgatgagtggatagatagattgctg

SEQ ID NO: 6411 - DNA, 25 bp, Homo sapiens
  source 1..25: mol_type = genomic DNA
gatgagtggatagatagattgctgg

SEQ ID NO: 6412 - DNA, 25 bp, Homo sapiens
  source 1..25: mol_type = genomic DNA
atgagtggatagatagattgctgga

SEQ ID NO: 6413 - DNA, 25 bp, Homo sapiens
  source 1..25: mol_type = genomic DNA
tgagtggatagatagattgctggat

SEQ ID NO: 6414 - DNA, 25 bp, Homo sapiens
  source 1..25: mol_type = genomic DNA
gagtggatagatagattgctggata

SEQ ID NO: 6415 - DNA, 25 bp, Homo sapiens
  source 1..25: mol_type = genomic DNA
agtggatagatagattgctggatag

SEQ ID NO: 6416 - DNA, 25 bp, Homo sapiens
  source 1..25: mol_type = genomic DNA
gtggatagatagattgctggataga

SEQ ID NO: 6417 - DNA, 25 bp, Homo sapiens
  source 1..25: mol_type = genomic DNA
tggatagatagattgctggatagat

SEQ ID NO: 6418 - DNA, 25 bp, Homo sapiens
  source 1..25: mol_type = genomic DNA
ggatagatagattgctggatagatg

SEQ ID NO: 6419 - DNA, 25 bp, Homo sapiens
  source 1..25: mol_type = genomic DNA
gatagatagattgctggatagatga

SEQ ID NO: 6420 - DNA, 25 bp, Homo sapiens
  source 1..25: mol_type = genomic DNA
atagatagattgctggatagatgat

SEQ ID NO: 6421 - DNA, 25 bp, Homo sapiens
  source 1..25: mol_type = genomic DNA
tagatagattgctggatagatgatt

SEQ ID NO: 6422 - DNA, 25 bp, Homo sapiens
  source 1..25: mol_type = genomic DNA
agatagattgctggatagatgattg

SEQ ID NO: 6423 - DNA, 25 bp, Homo sapiens
  source 1..25: mol_type = genomic DNA
gatagattgctggatagatgattga

SEQ ID NO: 6424 - DNA, 25 bp, Homo sapiens
  source 1..25: mol_type = genomic DNA
atagattgctggatagatgattgac

SEQ ID NO: 6425 - DNA, 25 bp, Homo sapiens
  source 1..25: mol_type = genomic DNA
tagattgctggatagatgattgact

SEQ ID NO: 6426 - DNA, 25 bp, Homo sapiens
  source 1..25: mol_type = genomic DNA
agattgctggatagatgattgactg

SEQ ID NO: 6427 - DNA, 25 bp, Homo sapiens
  source 1..25: mol_type = genomic DNA
gattgctggatagatgattgactgg

SEQ ID NO: 6428 - DNA, 25 bp, Homo sapiens
  source 1..25: mol_type = genomic DNA
attgctggatagatgattgactggg

SEQ ID NO: 6429 - DNA, 25 bp, Homo sapiens
  source 1..25: mol_type = genomic DNA
ttgctggatagatgattgactgggt

SEQ ID NO: 6430 - DNA, 25 bp, Homo sapiens
  source 1..25: mol_type = genomic DNA
tgctggatagatgattgactgggtg

SEQ ID NO: 6431 - DNA, 25 bp, Homo sapiens
  source 1..25: mol_type = genomic DNA
gctggatagatgattgactgggtgg

SEQ ID NO: 6432 - DNA, 25 bp, Homo sapiens
  source 1..25: mol_type = genomic DNA
ctggatagatgattgactgggtgga

SEQ ID NO: 6433 - DNA, 25 bp, Homo sapiens
  source 1..25: mol_type = genomic DNA
tggatagatgattgactgggtggat

SEQ ID NO: 6434 - DNA, 25 bp, Homo sapiens
  source 1..25: mol_type = genomic DNA
ggatagatgattgactgggtggata

SEQ ID NO: 6435 - DNA, 25 bp, Homo sapiens
  source 1..25: mol_type = genomic DNA
gatagatgattgactgggtggatag

SEQ ID NO: 6436 - DNA, 25 bp, Homo sapiens
  source 1..25: mol_type = genomic DNA
atagatgattgactgggtggataga

SEQ ID NO: 6437 - DNA, 25 bp, Homo sapiens
  source 1..25: mol_type = genomic DNA
tagatgattgactgggtggatagat

SEQ ID NO: 6438 - DNA, 25 bp, Homo sapiens
  source 1..25: mol_type = genomic DNA
agatgattgactgggtggatagatg

SEQ ID NO: 6439 - DNA, 25 bp, Homo sapiens
  source 1..25: mol_type = genomic DNA
gatgattgactgggtggatagatga

SEQ ID NO: 6440 - DNA, 25 bp, Homo sapiens
  source 1..25: mol_type = genomic DNA
atgattgactgggtggatagatgaa

SEQ ID NO: 6441 - DNA, 25 bp, Homo sapiens
  source 1..25: mol_type = genomic DNA
tgattgactgggtggatagatgaaa

SEQ ID NO: 6442 - DNA, 25 bp, Homo sapiens
  source 1..25: mol_type = genomic DNA
gattgactgggtggatagatgaaat

SEQ ID NO: 6443 - DNA, 25 bp, Homo sapiens
  source 1..25: mol_type = genomic DNA
attgactgggtggatagatgaaatg

SEQ ID NO: 6444 - DNA, 25 bp, Homo sapiens
  source 1..25: mol_type = genomic DNA
ttgactgggtggatagatgaaatgt

SEQ ID NO: 6445 - DNA, 25 bp, Homo sapiens
  source 1..25: mol_type = genomic DNA
tgactgggtggatagatgaaatgtt

SEQ ID NO: 6446 - DNA, 25 bp, Homo sapiens
  source 1..25: mol_type = genomic DNA
gactgggtggatagatgaaatgttg

SEQ ID NO: 6447 - DNA, 25 bp, Homo sapiens
  source 1..25: mol_type = genomic DNA
actgggtggatagatgaaatgttgg

SEQ ID NO: 6448 - DNA, 25 bp, Homo sapiens
  source 1..25: mol_type = genomic DNA
ctgggtggatagatgaaatgttgga

SEQ ID NO: 6449 - DNA, 25 bp, Homo sapiens
  source 1..25: mol_type = genomic DNA
tgggtggatagatgaaatgttggat

SEQ ID NO: 6450 - DNA, 25 bp, Homo sapiens
  source 1..25: mol_type = genomic DNA
gggtggatagatgaaatgttggatg

SEQ ID NO: 6451 - DNA, 25 bp, Homo sapiens
  source 1..25: mol_type = genomic DNA
ggtggatagatgaaatgttggatga

SEQ ID NO: 6452 - DNA, 25 bp, Homo sapiens
  source 1..25: mol_type = genomic DNA
gtggatagatgaaatgttggatgag

SEQ ID NO: 6453 - DNA, 25 bp, Homo sapiens
  source 1..25: mol_type = genomic DNA
tggatagatgaaatgttggatgagc

SEQ ID NO: 6454 - DNA, 25 bp, Homo sapiens
  source 1..25: mol_type = genomic DNA
ggatagatgaaatgttggatgagca

SEQ ID NO: 6455 - DNA, 25 bp, Homo sapiens
  source 1..25: mol_type = genomic DNA
gatagatgaaatgttggatgagcag

SEQ ID NO: 6456 - DNA, 25 bp, Homo sapiens
  source 1..25: mol_type = genomic DNA
atagatgaaatgttggatgagcaga

SEQ ID NO: 6457 - DNA, 25 bp, Homo sapiens
  source 1..25: mol_type = genomic DNA
tagatgaaatgttggatgagcagat

SEQ ID NO: 6458 - DNA, 25 bp, Homo sapiens
  source 1..25: mol_type = genomic DNA
agatgaaatgttggatgagcagatt

SEQ ID NO: 6459 - DNA, 25 bp, Homo sapiens
  source 1..25: mol_type = genomic DNA
gatgaaatgttggatgagcagatta

SEQ ID NO: 6460 - DNA, 25 bp, Homo sapiens
  source 1..25: mol_type = genomic DNA
atgaaatgttggatgagcagattaa

SEQ ID NO: 6461 - DNA, 25 bp, Homo sapiens
  source 1..25: mol_type = genomic DNA
tgaaatgttggatgagcagattaag

SEQ ID NO: 6462 - DNA, 25 bp, Homo sapiens
  source 1..25: mol_type = genomic DNA
gaaatgttggatgagcagattaagt

SEQ ID NO: 6463 - DNA, 25 bp, Homo sapiens
  source 1..25: mol_type = genomic DNA
aaatgttggatgagcagattaagtt

SEQ ID NO: 6464 - DNA, 25 bp, Homo sapiens
  source 1..25: mol_type = genomic DNA
aatgttggatgagcagattaagttg

SEQ ID NO: 6465 - DNA, 25 bp, Homo sapiens
  source 1..25: mol_type = genomic DNA
atgttggatgagcagattaagttgt

SEQ ID NO: 6466 - DNA, 25 bp, Homo sapiens
  source 1..25: mol_type = genomic DNA
tgttggatgagcagattaagttgta

SEQ ID NO: 6467 - DNA, 25 bp, Homo sapiens
  source 1..25: mol_type = genomic DNA
gttggatgagcagattaagttgtat

SEQ ID NO: 6468 - DNA, 25 bp, Homo sapiens
  source 1..25: mol_type = genomic DNA
ttggatgagcagattaagttgtatt

SEQ ID NO: 6469 - DNA, 25 bp, Homo sapiens
  source 1..25: mol_type = genomic DNA
tggatgagcagattaagttgtattg

SEQ ID NO: 6470 - DNA, 25 bp, Homo sapiens
  source 1..25: mol_type = genomic DNA
ggatgagcagattaagttgtattgg

SEQ ID NO: 6471 - DNA, 25 bp, Homo sapiens
  source 1..25: mol_type = genomic DNA
gatgagcagattaagttgtattgga

SEQ ID NO: 6472 - DNA, 25 bp, Homo sapiens
  source 1..25: mol_type = genomic DNA
atgagcagattaagttgtattggat

SEQ ID NO: 6473 - DNA, 25 bp, Homo sapiens
  source 1..25: mol_type = genomic DNA
tgagcagattaagttgtattggatg

SEQ ID NO: 6474 - DNA, 25 bp, Homo sapiens
  source 1..25: mol_type = genomic DNA
gagcagattaagttgtattggatgg

SEQ ID NO: 6475 - DNA, 25 bp, Homo sapiens
  source 1..25: mol_type = genomic DNA
agcagattaagttgtattggatggg

SEQ ID NO: 6476 - DNA, 25 bp, Homo sapiens
  source 1..25: mol_type = genomic DNA
gcagattaagttgtattggatggga

SEQ ID NO: 6477 - DNA, 25 bp, Homo sapiens
  source 1..25: mol_type = genomic DNA
cagattaagttgtattggatgggat

SEQ ID NO: 6478 - DNA, 25 bp, Homo sapiens
  source 1..25: mol_type = genomic DNA
agattaagttgtattggatgggatg

SEQ ID NO: 6479 - DNA, 25 bp, Homo sapiens
  source 1..25: mol_type = genomic DNA
gattaagttgtattggatgggatgg

SEQ ID NO: 6480 - DNA, 25 bp, Homo sapiens
  source 1..25: mol_type = genomic DNA
attaagttgtattggatgggatgga

SEQ ID NO: 6481 - DNA, 25 bp, Homo sapiens
  source 1..25: mol_type = genomic DNA
ttaagttgtattggatgggatggat

SEQ ID NO: 6482 - DNA, 25 bp, Homo sapiens
  source 1..25: mol_type = genomic DNA
taagttgtattggatgggatggatg

SEQ ID NO: 6483 - DNA, 25 bp, Homo sapiens
  source 1..25: mol_type = genomic DNA
aagttgtattggatgggatggatgg

SEQ ID NO: 6484 - DNA, 25 bp, Homo sapiens
  source 1..25: mol_type = genomic DNA
agttgtattggatgggatggatgga

SEQ ID NO: 6485 - DNA, 25 bp, Homo sapiens
  source 1..25: mol_type = genomic DNA
gttgtattggatgggatggatggaa

SEQ ID NO: 6486 - DNA, 25 bp, Homo sapiens
  source 1..25: mol_type = genomic DNA
ttgtattggatgggatggatggaag

SEQ ID NO: 6487 - DNA, 25 bp, Homo sapiens
  source 1..25: mol_type = genomic DNA
tgtattggatgggatggatggaagt

SEQ ID NO: 6488 - DNA, 25 bp, Homo sapiens
  source 1..25: mol_type = genomic DNA
gtattggatgggatggatggaagtg

SEQ ID NO: 6489 - DNA, 25 bp, Homo sapiens
  source 1..25: mol_type = genomic DNA
tattggatgggatggatggaagtgt

SEQ ID NO: 6490 - DNA, 25 bp, Homo sapiens
  source 1..25: mol_type = genomic DNA
attggatgggatggatggaagtgtg

SEQ ID NO: 6491 - DNA, 25 bp, Homo sapiens
  source 1..25: mol_type = genomic DNA
ttggatgggatggatggaagtgtgg

SEQ ID NO: 6492 - DNA, 25 bp, Homo sapiens
  source 1..25: mol_type = genomic DNA
tggatgggatggatggaagtgtggt

SEQ ID NO: 6493 - DNA, 25 bp, Homo sapiens
  source 1..25: mol_type = genomic DNA
ggatgggatggatggaagtgtggtt

SEQ ID NO: 6494 - DNA, 25 bp, Homo sapiens
  source 1..25: mol_type = genomic DNA
gatgggatggatggaagtgtggttg

SEQ ID NO: 6495 - DNA, 25 bp, Homo sapiens
  source 1..25: mol_type = genomic DNA
atgggatggatggaagtgtggttga

SEQ ID NO: 6496 - DNA, 25 bp, Homo sapiens
  source 1..25: mol_type = genomic DNA
tgggatggatggaagtgtggttgag

SEQ ID NO: 6497 - DNA, 25 bp, Homo sapiens
  source 1..25: mol_type = genomic DNA
gggatggatggaagtgtggttgagt

SEQ ID NO: 6498 - DNA, 25 bp, Homo sapiens
  source 1..25: mol_type = genomic DNA
ggatggatggaagtgtggttgagtt

SEQ ID NO: 6499 - DNA, 25 bp, Homo sapiens
  source 1..25: mol_type = genomic DNA
gatggatggaagtgtggttgagtta

SEQ ID NO: 6500 - DNA, 25 bp, Homo sapiens
  source 1..25: mol_type = genomic DNA
atggatggaagtgtggttgagttat

SEQ ID NO: 6501 - DNA, 25 bp, Homo sapiens
  source 1..25: mol_type = genomic DNA
tggatggaagtgtggttgagttatt

SEQ ID NO: 6502 - DNA, 25 bp, Homo sapiens
  source 1..25: mol_type = genomic DNA
ggatggaagtgtggttgagttatta

SEQ ID NO: 6503 - DNA, 25 bp, Homo sapiens
  source 1..25: mol_type = genomic DNA
gatggaagtgtggttgagttattag

SEQ ID NO: 6504 - DNA, 25 bp, Homo sapiens
  source 1..25: mol_type = genomic DNA
atggaagtgtggttgagttattaga

SEQ ID NO: 6505 - DNA, 25 bp, Homo sapiens
  source 1..25: mol_type = genomic DNA
tggaagtgtggttgagttattagaa

SEQ ID NO: 6506 - DNA, 25 bp, Homo sapiens
  source 1..25: mol_type = genomic DNA
ggaagtgtggttgagttattagaag

SEQ ID NO: 6507 - DNA, 25 bp, Homo sapiens
  source 1..25: mol_type = genomic DNA
gaagtgtggttgagttattagaagg

SEQ ID NO: 6508 - DNA, 25 bp, Homo sapiens
  source 1..25: mol_type = genomic DNA
aagtgtggttgagttattagaagga

SEQ ID NO: 6509 - DNA, 25 bp, Homo sapiens
  source 1..25: mol_type = genomic DNA
agtgtggttgagttattagaaggaa

SEQ ID NO: 6510 - DNA, 25 bp, Homo sapiens
  source 1..25: mol_type = genomic DNA
gtgtggttgagttattagaaggaag

SEQ ID NO: 6511 - DNA, 25 bp, Homo sapiens
  source 1..25: mol_type = genomic DNA
tgtggttgagttattagaaggaaga

SEQ ID NO: 6512 - DNA, 25 bp, Homo sapiens
  source 1..25: mol_type = genomic DNA
gtggttgagttattagaaggaagat

SEQ ID NO: 6513 - DNA, 25 bp, Homo sapiens
  source 1..25: mol_type = genomic DNA
tggttgagttattagaaggaagatt

SEQ ID NO: 6514 - DNA, 25 bp, Homo sapiens
  source 1..25: mol_type = genomic DNA
ggttgagttattagaaggaagattg

SEQ ID NO: 6515 - DNA, 25 bp, Homo sapiens
  source 1..25: mol_type = genomic DNA
gttgagttattagaaggaagattga

SEQ ID NO: 6516 - DNA, 25 bp, Homo sapiens
  source 1..25: mol_type = genomic DNA
ttgagttattagaaggaagattgag

SEQ ID NO: 6517 - DNA, 25 bp, Homo sapiens
  source 1..25: mol_type = genomic DNA
tgagttattagaaggaagattgagt

SEQ ID NO: 6518 - DNA, 25 bp, Homo sapiens
  source 1..25: mol_type = genomic DNA
gagttattagaaggaagattgagta

SEQ ID NO: 6519 - DNA, 25 bp, Homo sapiens
  source 1..25: mol_type = genomic DNA
agttattagaaggaagattgagtag

SEQ ID NO: 6520 - DNA, 25 bp, Homo sapiens
  source 1..25: mol_type = genomic DNA
gttattagaaggaagattgagtaga

SEQ ID NO: 6521 - DNA, 25 bp, Homo sapiens
  source 1..25: mol_type = genomic DNA
ttattagaaggaagattgagtagat

SEQ ID NO: 6522 - DNA, 25 bp, Homo sapiens
  source 1..25: mol_type = genomic DNA
tattagaaggaagattgagtagata

SEQ ID NO: 6523 - DNA, 25 bp, Homo sapiens
  source 1..25: mol_type = genomic DNA
attagaaggaagattgagtagatag

SEQ ID NO: 6524 - DNA, 25 bp, Homo sapiens
  source 1..25: mol_type = genomic DNA
ttagaaggaagattgagtagatagg

SEQ ID NO: 6525 - DNA, 25 bp, Homo sapiens
  source 1..25: mol_type = genomic DNA
tagaaggaagattgagtagataggt

SEQ ID NO: 6526 - DNA, 25 bp, Homo sapiens
  source 1..25: mol_type = genomic DNA
agaaggaagattgagtagataggtg

SEQ ID NO: 6527 - DNA, 25 bp, Homo sapiens
  source 1..25: mol_type = genomic DNA
gaaggaagattgagtagataggtga

SEQ ID NO: 6528 - DNA, 25 bp, Homo sapiens
  source 1..25: mol_type = genomic DNA
aaggaagattgagtagataggtgaa

SEQ ID NO: 6529 - DNA, 25 bp, Homo sapiens
  source 1..25: mol_type = genomic DNA
aggaagattgagtagataggtgaat

SEQ ID NO: 6530 - DNA, 25 bp, Homo sapiens
  source 1..25: mol_type = genomic DNA
ggaagattgagtagataggtgaatt

SEQ ID NO: 6531 - DNA, 25 bp, Homo sapiens
  source 1..25: mol_type = genomic DNA
gaagattgagtagataggtgaattt

SEQ ID NO: 6532 - DNA, 25 bp, Homo sapiens
  source 1..25: mol_type = genomic DNA
aagattgagtagataggtgaatttg

SEQ ID NO: 6533 - DNA, 25 bp, Homo sapiens
  source 1..25: mol_type = genomic DNA
agattgagtagataggtgaatttgt

SEQ ID NO: 6534 - DNA, 25 bp, Homo sapiens
  source 1..25: mol_type = genomic DNA
gattgagtagataggtgaatttgtt

SEQ ID NO: 6535 - DNA, 25 bp, Homo sapiens
  source 1..25: mol_type = genomic DNA
attgagtagataggtgaatttgttg

SEQ ID NO: 6536 - DNA, 25 bp, Homo sapiens
  source 1..25: mol_type = genomic DNA
ttgagtagataggtgaatttgttga

SEQ ID NO: 6537 - DNA, 25 bp, Homo sapiens
  source 1..25: mol_type = genomic DNA
tgagtagataggtgaatttgttgat

SEQ ID NO: 6538 - DNA, 25 bp, Homo sapiens
  source 1..25: mol_type = genomic DNA
gagtagataggtgaatttgttgata

SEQ ID NO: 6539 - DNA, 25 bp, Homo sapiens
  source 1..25: mol_type = genomic DNA
agtagataggtgaatttgttgatag

SEQ ID NO: 6540 - DNA, 25 bp, Homo sapiens
  source 1..25: mol_type = genomic DNA
gtagataggtgaatttgttgatagt

SEQ ID NO: 6541 - DNA, 25 bp, Homo sapiens
  source 1..25: mol_type = genomic DNA
tagataggtgaatttgttgatagtc

SEQ ID NO: 6542 - DNA, 25 bp, Homo sapiens
  source 1..25: mol_type = genomic DNA
agataggtgaatttgttgatagtca

SEQ ID NO: 6543 - DNA, 25 bp, Homo sapiens
  source 1..25: mol_type = genomic DNA
gataggtgaatttgttgatagtcag

SEQ ID NO: 6544 - DNA, 25 bp, Homo sapiens
  source 1..25: mol_type = genomic DNA
ataggtgaatttgttgatagtcaga

SEQ ID NO: 6545 - DNA, 25 bp, Homo sapiens
  source 1..25: mol_type = genomic DNA
taggtgaatttgttgatagtcagat

SEQ ID NO: 6546 - DNA, 25 bp, Homo sapiens
  source 1..25: mol_type = genomic DNA
aggtgaatttgttgatagtcagatg

SEQ ID NO: 6547 - DNA, 25 bp, Homo sapiens
  source 1..25: mol_type = genomic DNA
ggtgaatttgttgatagtcagatgg

SEQ ID NO: 6548 - DNA, 25 bp, Homo sapiens
  source 1..25: mol_type = genomic DNA
gtgaatttgttgatagtcagatggg

SEQ ID NO: 6549 - DNA, 25 bp, Homo sapiens
  source 1..25: mol_type = genomic DNA
tgaatttgttgatagtcagatgggt

SEQ ID NO: 6550 - DNA, 25 bp, Homo sapiens
  source 1..25: mol_type = genomic DNA
gaatttgttgatagtcagatgggta

SEQ ID NO: 6551 - DNA, 25 bp, Homo sapiens
  source 1..25: mol_type = genomic DNA
aatttgttgatagtcagatgggtag

SEQ ID NO: 6552 - DNA, 25 bp, Homo sapiens
  source 1..25: mol_type = genomic DNA
atttgttgatagtcagatgggtaga

SEQ ID NO: 6553 - DNA, 25 bp, Homo sapiens
  source 1..25: mol_type = genomic DNA
tttgttgatagtcagatgggtagat

SEQ ID NO: 6554 - DNA, 25 bp, Homo sapiens
  source 1..25: mol_type = genomic DNA
ttgttgatagtcagatgggtagata

SEQ ID NO: 6555 - DNA, 25 bp, Homo sapiens
  source 1..25: mol_type = genomic DNA
tgttgatagtcagatgggtagatag

SEQ ID NO: 6556 - DNA, 25 bp, Homo sapiens
  source 1..25: mol_type = genomic DNA
gttgatagtcagatgggtagatagg

SEQ ID NO: 6557 - DNA, 25 bp, Homo sapiens
  source 1..25: mol_type = genomic DNA
ttgatagtcagatgggtagataggt

SEQ ID NO: 6558 - DNA, 25 bp, Homo sapiens
  source 1..25: mol_type = genomic DNA
tgatagtcagatgggtagataggta

SEQ ID NO: 6559 - DNA, 25 bp, Homo sapiens
  source 1..25: mol_type = genomic DNA
gatagtcagatgggtagataggtag

SEQ ID NO: 6560 - DNA, 25 bp, Homo sapiens
  source 1..25: mol_type = genomic DNA
atagtcagatgggtagataggtaga

SEQ ID NO: 6561 - DNA, 25 bp, Homo sapiens
  source 1..25: mol_type = genomic DNA
tagtcagatgggtagataggtagat

SEQ ID NO: 6562 - DNA, 25 bp, Homo sapiens
  source 1..25: mol_type = genomic DNA
agtcagatgggtagataggtagatg

SEQ ID NO: 6563 - DNA, 25 bp, Homo sapiens
  source 1..25: mol_type = genomic DNA
gtcagatgggtagataggtagatgg

SEQ ID NO: 6564 - DNA, 25 bp, Homo sapiens
  source 1..25: mol_type = genomic DNA
tcagatgggtagataggtagatgga

SEQ ID NO: 6565 - DNA, 25 bp, Homo sapiens
  source 1..25: mol_type = genomic DNA
cagatgggtagataggtagatggat

SEQ ID NO: 6566 - DNA, 25 bp, Homo sapiens
  source 1..25: mol_type = genomic DNA
agatgggtagataggtagatggatg

SEQ ID NO: 6567 - DNA, 25 bp, Homo sapiens
  source 1..25: mol_type = genomic DNA
gatgggtagataggtagatggatgg

SEQ ID NO: 6568 - DNA, 25 bp, Homo sapiens
  source 1..25: mol_type = genomic DNA
atgggtagataggtagatggatgga

SEQ ID NO: 6569 - DNA, 25 bp, Homo sapiens
  source 1..25: mol_type = genomic DNA
tgggtagataggtagatggatggat

SEQ ID NO: 6570 - DNA, 25 bp, Homo sapiens
  source 1..25: mol_type = genomic DNA
gggtagataggtagatggatggatg

SEQ ID NO: 6571 - DNA, 25 bp, Homo sapiens
  source 1..25: mol_type = genomic DNA
ggtagataggtagatggatggatgg

SEQ ID NO: 6572 - DNA, 25 bp, Homo sapiens
  source 1..25: mol_type = genomic DNA
gtagataggtagatggatggatgga

SEQ ID NO: 6573 - DNA, 25 bp, Homo sapiens
  source 1..25: mol_type = genomic DNA
tagataggtagatggatggatggat

SEQ ID NO: 6574 - DNA, 25 bp, Homo sapiens
  source 1..25: mol_type = genomic DNA
agataggtagatggatggatggatg

SEQ ID NO: 6575 - DNA, 25 bp, Homo sapiens
  source 1..25: mol_type = genomic DNA
gataggtagatggatggatggatgg

SEQ ID NO: 6576 - DNA, 25 bp, Homo sapiens
  source 1..25: mol_type = genomic DNA
ataggtagatggatggatggatgga

SEQ ID NO: 6577 - DNA, 25 bp, Homo sapiens
  source 1..25: mol_type = genomic DNA
taggtagatggatggatggatggat

SEQ ID NO: 6578 - DNA, 25 bp, Homo sapiens
  source 1..25: mol_type = genomic DNA
aggtagatggatggatggatggatg

SEQ ID NO: 6579 - DNA, 25 bp, Homo sapiens
  source 1..25: mol_type = genomic DNA
ggtagatggatggatggatggatgg

SEQ ID NO: 6580 - DNA, 25 bp, Homo sapiens
  source 1..25: mol_type = genomic DNA
gtagatggatggatggatggatgga

SEQ ID NO: 6581 - DNA, 25 bp, Homo sapiens
  source 1..25: mol_type = genomic DNA
tagatggatggatggatggatggat

SEQ ID NO: 6582 - DNA, 25 bp, Homo sapiens
  source 1..25: mol_type = genomic DNA
agatggatggatggatggatggatg

SEQ ID NO: 6583 - DNA, 25 bp, Homo sapiens
  source 1..25: mol_type = genomic DNA
gatggatggatggatggatggatgt

SEQ ID NO: 6584 - DNA, 25 bp, Homo sapiens
  source 1..25: mol_type = genomic DNA
atggatggatggatggatggatgta

SEQ ID NO: 6585 - DNA, 25 bp, Homo sapiens
  source 1..25: mol_type = genomic DNA
tggatggatggatggatggatgtat

SEQ ID NO: 6586 - DNA, 25 bp, Homo sapiens
  source 1..25: mol_type = genomic DNA
ggatggatggatggatggatgtata

SEQ ID NO: 6587 - DNA, 25 bp, Homo sapiens
  source 1..25: mol_type = genomic DNA
gatggatggatggatggatgtatag

SEQ ID NO: 6588 - DNA, 25 bp, Homo sapiens
  source 1..25: mol_type = genomic DNA
atggatggatggatggatgtatagg

SEQ ID NO: 6589 - DNA, 25 bp, Homo sapiens
  source 1..25: mol_type = genomic DNA
tggatggatggatggatgtataggc

SEQ ID NO: 6590 - DNA, 25 bp, Homo sapiens
  source 1..25: mol_type = genomic DNA
ggatggatggatggatgtataggca

SEQ ID NO: 6591 - DNA, 25 bp, Homo sapiens
  source 1..25: mol_type = genomic DNA
gatggatggatggatgtataggcag

SEQ ID NO: 6592 - DNA, 25 bp, Homo sapiens
  source 1..25: mol_type = genomic DNA
atggatggatggatgtataggcaga

SEQ ID NO: 6593 - DNA, 25 bp, Homo sapiens
  source 1..25: mol_type = genomic DNA
tggatggatggatgtataggcagat

SEQ ID NO: 6594 - DNA, 25 bp, Homo sapiens
  source 1..25: mol_type = genomic DNA
ggatggatggatgtataggcagatg

SEQ ID NO: 6595 - DNA, 25 bp, Homo sapiens
  source 1..25: mol_type = genomic DNA
gatggatggatgtataggcagatgg

SEQ ID NO: 6596 - DNA, 25 bp, Homo sapiens
  source 1..25: mol_type = genomic DNA
atggatggatgtataggcagatgga

SEQ ID NO: 6597 - DNA, 25 bp, Homo sapiens
  source 1..25: mol_type = genomic DNA
tggatggatgtataggcagatggac

SEQ ID NO: 6598 - DNA, 25 bp, Homo sapiens
  source 1..25: mol_type = genomic DNA
ggatggatgtataggcagatggaca

SEQ ID NO: 6599 - DNA, 25 bp, Homo sapiens
  source 1..25: mol_type = genomic DNA
gatggatgtataggcagatggacaa

SEQ ID NO: 6600 - DNA, 25 bp, Homo sapiens
  source 1..25: mol_type = genomic DNA
atggatgtataggcagatggacaaa

SEQ ID NO: 6601 - DNA, 25 bp, Homo sapiens
  source 1..25: mol_type = genomic DNA
tggatgtataggcagatggacaaat

SEQ ID NO: 6602 - DNA, 25 bp, Homo sapiens
  source 1..25: mol_type = genomic DNA
ggatgtataggcagatggacaaatg

SEQ ID NO: 6603 - DNA, 25 bp, Homo sapiens
  source 1..25: mol_type = genomic DNA
gatgtataggcagatggacaaatgg

SEQ ID NO: 6604 - DNA, 25 bp, Homo sapiens
  source 1..25: mol_type = genomic DNA
atgtataggcagatggacaaatgga

SEQ ID NO: 6605 - DNA, 25 bp, Homo sapiens
  source 1..25: mol_type = genomic DNA
tgtataggcagatggacaaatggat

SEQ ID NO: 6606 - DNA, 25 bp, Homo sapiens
  source 1..25: mol_type = genomic DNA
gtataggcagatggacaaatggatg

SEQ ID NO: 6607 - DNA, 25 bp, Homo sapiens
  source 1..25: mol_type = genomic DNA
tataggcagatggacaaatggatga

SEQ ID NO: 6608 - DNA, 25 bp, Homo sapiens
  source 1..25: mol_type = genomic DNA
ataggcagatggacaaatggatgaa

SEQ ID NO: 6609 - DNA, 25 bp, Homo sapiens
  source 1..25: mol_type = genomic DNA
taggcagatggacaaatggatgaat

SEQ ID NO: 6610 - DNA, 25 bp, Homo sapiens
  source 1..25: mol_type = genomic DNA
aggcagatggacaaatggatgaatg

SEQ ID NO: 6611 - DNA, 25 bp, Homo sapiens
  source 1..25: mol_type = genomic DNA
ggcagatggacaaatggatgaatgg

SEQ ID NO: 6612 - DNA, 25 bp, Homo sapiens
  source 1..25: mol_type = genomic DNA
gcagatggacaaatggatgaatggg

SEQ ID NO: 6613 - DNA, 25 bp, Homo sapiens
  source 1..25: mol_type = genomic DNA
cagatggacaaatggatgaatgggt

SEQ ID NO: 6614 - DNA, 25 bp, Homo sapiens
  source 1..25: mol_type = genomic DNA
agatggacaaatggatgaatgggtg

SEQ ID NO: 6615 - DNA, 25 bp, Homo sapiens
  source 1..25: mol_type = genomic DNA
gatggacaaatggatgaatgggtgg

SEQ ID NO: 6616 - DNA, 25 bp, Homo sapiens
  source 1..25: mol_type = genomic DNA
atggacaaatggatgaatgggtggg

SEQ ID NO: 6617 - DNA, 25 bp, Homo sapiens
  source 1..25: mol_type = genomic DNA
tggacaaatggatgaatgggtgggt

SEQ ID NO: 6618 - DNA, 25 bp, Homo sapiens
  source 1..25: mol_type = genomic DNA
ggacaaatggatgaatgggtgggtg

SEQ ID NO: 6619 - DNA, 25 bp, Homo sapiens
  source 1..25: mol_type = genomic DNA
gacaaatggatgaatgggtgggtgg

SEQ ID NO: 6620 - DNA, 25 bp, Homo sapiens
  source 1..25: mol_type = genomic DNA
acaaatggatgaatgggtgggtgga

SEQ ID NO: 6621 - DNA, 25 bp, Homo sapiens
  source 1..25: mol_type = genomic DNA
caaatggatgaatgggtgggtggat

SEQ ID NO: 6622 - DNA, 25 bp, Homo sapiens
  source 1..25: mol_type = genomic DNA
aaatggatgaatgggtgggtggatg

SEQ ID NO: 6623 - DNA, 25 bp, Homo sapiens
  source 1..25: mol_type = genomic DNA
aatggatgaatgggtgggtggatga

SEQ ID NO: 6624 - DNA, 25 bp, Homo sapiens
  source 1..25: mol_type = genomic DNA
atggatgaatgggtgggtggatgaa

SEQ ID NO: 6625 - DNA, 25 bp, Homo sapiens
  source 1..25: mol_type = genomic DNA
tggatgaatgggtgggtggatgaat

SEQ ID NO: 6626 - DNA, 25 bp, Homo sapiens
  source 1..25: mol_type = genomic DNA
ggatgaatgggtgggtggatgaatg

SEQ ID NO: 6627 - DNA, 25 bp, Homo sapiens
  source 1..25: mol_type = genomic DNA
gatgaatgggtgggtggatgaatgg

SEQ ID NO: 6628 - DNA, 25 bp, Homo sapiens
  source 1..25: mol_type = genomic DNA
atgaatgggtgggtggatgaatgga

SEQ ID NO: 6629 - DNA, 25 bp, Homo sapiens
  source 1..25: mol_type = genomic DNA
tgaatgggtgggtggatgaatggaa

SEQ ID NO: 6630 - DNA, 25 bp, Homo sapiens
  source 1..25: mol_type = genomic DNA
gaatgggtgggtggatgaatggaag

SEQ ID NO: 6631 - DNA, 25 bp, Homo sapiens
  source 1..25: mol_type = genomic DNA
aatgggtgggtggatgaatggaagg

SEQ ID NO: 6632 - DNA, 25 bp, Homo sapiens
  source 1..25: mol_type = genomic DNA
atgggtgggtggatgaatggaagga

SEQ ID NO: 6633 - DNA, 25 bp, Homo sapiens
  source 1..25: mol_type = genomic DNA
tgggtgggtggatgaatggaaggat

SEQ ID NO: 6634 - DNA, 25 bp, Homo sapiens
  source 1..25: mol_type = genomic DNA
gggtgggtggatgaatggaaggatg

SEQ ID NO: 6635 - DNA, 25 bp, Homo sapiens
  source 1..25: mol_type = genomic DNA
ggtgggtggatgaatggaaggatgt

SEQ ID NO: 6636 - DNA, 25 bp, Homo sapiens
  source 1..25: mol_type = genomic DNA
gtgggtggatgaatggaaggatgtg

SEQ ID NO: 6637 - DNA, 25 bp, Homo sapiens
  source 1..25: mol_type = genomic DNA
tgggtggatgaatggaaggatgtgt

SEQ ID NO: 6638 - DNA, 25 bp, Homo sapiens
  source 1..25: mol_type = genomic DNA
gggtggatgaatggaaggatgtgtg

SEQ ID NO: 6639 - DNA, 25 bp, Homo sapiens
  source 1..25: mol_type = genomic DNA
ggtggatgaatggaaggatgtgtgg

SEQ ID NO: 6640 - DNA, 25 bp, Homo sapiens
  source 1..25: mol_type = genomic DNA
gtggatgaatggaaggatgtgtggt

SEQ ID NO: 6641 - DNA, 25 bp, Homo sapiens
  source 1..25: mol_type = genomic DNA
tggatgaatggaaggatgtgtggtt

SEQ ID NO: 6642 - DNA, 25 bp, Homo sapiens
  source 1..25: mol_type = genomic DNA
ggatgaatggaaggatgtgtggttg

SEQ ID NO: 6643 - DNA, 25 bp, Homo sapiens
  source 1..25: mol_type = genomic DNA
gatgaatggaaggatgtgtggttga

SEQ ID NO: 6644 - DNA, 25 bp, Homo sapiens
  source 1..25: mol_type = genomic DNA
atgaatggaaggatgtgtggttgaa

SEQ ID NO: 6645 - DNA, 25 bp, Homo sapiens
  source 1..25: mol_type = genomic DNA
tgaatggaaggatgtgtggttgaac

SEQ ID NO: 6646 - DNA, 25 bp, Homo sapiens
  source 1..25: mol_type = genomic DNA
gaatggaaggatgtgtggttgaact

SEQ ID NO: 6647 - DNA, 25 bp, Homo sapiens
  source 1..25: mol_type = genomic DNA
aatggaaggatgtgtggttgaacta

SEQ ID NO: 6648 - DNA, 25 bp, Homo sapiens
  source 1..25: mol_type = genomic DNA
atggaaggatgtgtggttgaactat

SEQ ID NO: 6649 - DNA, 25 bp, Homo sapiens
  source 1..25: mol_type = genomic DNA
tggaaggatgtgtggttgaactatt

SEQ ID NO: 6650 - DNA, 25 bp, Homo sapiens
  source 1..25: mol_type = genomic DNA
ggaaggatgtgtggttgaactattg

SEQ ID NO: 6651 - DNA, 25 bp, Homo sapiens
  source 1..25: mol_type = genomic DNA
gaaggatgtgtggttgaactattgc

SEQ ID NO: 6652 - DNA, 25 bp, Homo sapiens
  source 1..25: mol_type = genomic DNA
aaggatgtgtggttgaactattgca

SEQ ID NO: 6653 - DNA, 25 bp, Homo sapiens
  source 1..25: mol_type = genomic DNA
aggatgtgtggttgaactattgcaa

SEQ ID NO: 6654 - DNA, 25 bp, Homo sapiens
  source 1..25: mol_type = genomic DNA
ggatgtgtggttgaactattgcaag

SEQ ID NO: 6655 - DNA, 25 bp, Homo sapiens
  source 1..25: mol_type = genomic DNA
gatgtgtggttgaactattgcaagt

SEQ ID NO: 6656 - DNA, 25 bp, Homo sapiens
  source 1..25: mol_type = genomic DNA
atgtgtggttgaactattgcaagta

SEQ ID NO: 6657 - DNA, 25 bp, Homo sapiens
  source 1..25: mol_type = genomic DNA
tgtgtggttgaactattgcaagtat

SEQ ID NO: 6658 - DNA, 25 bp, Homo sapiens
  source 1..25: mol_type = genomic DNA
gtgtggttgaactattgcaagtatt

SEQ ID NO: 6659 - DNA, 25 bp, Homo sapiens
  source 1..25: mol_type = genomic DNA
tgtggttgaactattgcaagtattg

SEQ ID NO: 6660 - DNA, 25 bp, Homo sapiens
  source 1..25: mol_type = genomic DNA
gtggttgaactattgcaagtattga

SEQ ID NO: 6661 - DNA, 25 bp, Homo sapiens
  source 1..25: mol_type = genomic DNA
tggttgaactattgcaagtattgat

SEQ ID NO: 6662 - DNA, 25 bp, Homo sapiens
  source 1..25: mol_type = genomic DNA
ggttgaactattgcaagtattgata

SEQ ID NO: 6663 - DNA, 25 bp, Homo sapiens
  source 1..25: mol_type = genomic DNA
gttgaactattgcaagtattgataa

SEQ ID NO: 6664 - DNA, 25 bp, Homo sapiens
  source 1..25: mol_type = genomic DNA
ttgaactattgcaagtattgataat

SEQ ID NO: 6665 - DNA, 25 bp, Homo sapiens
  source 1..25: mol_type = genomic DNA
tgaactattgcaagtattgataatt

SEQ ID NO: 6666 - DNA, 25 bp, Homo sapiens
  source 1..25: mol_type = genomic DNA
gaactattgcaagtattgataattg

SEQ ID NO: 6667 - DNA, 25 bp, Homo sapiens
  source 1..25: mol_type = genomic DNA
aactattgcaagtattgataattgg

SEQ ID NO: 6668 - DNA, 25 bp, Homo sapiens
  source 1..25: mol_type = genomic DNA
actattgcaagtattgataattggg

SEQ ID NO: 6669 - DNA, 25 bp, Homo sapiens
  source 1..25: mol_type = genomic DNA
ctattgcaagtattgataattgggt

SEQ ID NO: 6670 - DNA, 25 bp, Homo sapiens
  source 1..25: mol_type = genomic DNA
tattgcaagtattgataattgggtt

SEQ ID NO: 6671 - DNA, 25 bp, Homo sapiens
  source 1..25: mol_type = genomic DNA
attgcaagtattgataattgggttc

SEQ ID NO: 6672 - DNA, 25 bp, Homo sapiens
  source 1..25: mol_type = genomic DNA
ttgcaagtattgataattgggttca

SEQ ID NO: 6673 - DNA, 25 bp, Homo sapiens
  source 1..25: mol_type = genomic DNA
tgcaagtattgataattgggttcat

SEQ ID NO: 6674 - DNA, 25 bp, Homo sapiens
  source 1..25: mol_type = genomic DNA
gcaagtattgataattgggttcata

SEQ ID NO: 6675 - DNA, 25 bp, Homo sapiens
  source 1..25: mol_type = genomic DNA
caagtattgataattgggttcataa

SEQ ID NO: 6676 - DNA, 25 bp, Homo sapiens
  source 1..25: mol_type = genomic DNA
aagtattgataattgggttcataat

SEQ ID NO: 6677 - DNA, 25 bp, Homo sapiens
  source 1..25: mol_type = genomic DNA
agtattgataattgggttcataatt

SEQ ID NO: 6678 - DNA, 25 bp, Homo sapiens
  source 1..25: mol_type = genomic DNA
gtattgataattgggttcataattt

SEQ ID NO: 6679 - DNA, 25 bp, Homo sapiens
  source 1..25: mol_type = genomic DNA
tattgataattgggttcataatttc

SEQ ID NO: 6680 - DNA, 25 bp, Homo sapiens
  source 1..25: mol_type = genomic DNA
attgataattgggttcataatttct

SEQ ID NO: 6681 - DNA, 25 bp, Homo sapiens
  source 1..25: mol_type = genomic DNA
ttgataattgggttcataatttctg

SEQ ID NO: 6682 - DNA, 25 bp, Homo sapiens
  source 1..25: mol_type = genomic DNA
tgataattgggttcataatttctga

SEQ ID NO: 6683 - DNA, 25 bp, Homo sapiens
  source 1..25: mol_type = genomic DNA
gataattgggttcataatttctgaa

SEQ ID NO: 6684 - DNA, 25 bp, Homo sapiens
  source 1..25: mol_type = genomic DNA
ataattgggttcataatttctgaat

SEQ ID NO: 6685 - DNA, 25 bp, Homo sapiens
  source 1..25: mol_type = genomic DNA
taattgggttcataatttctgaata

SEQ ID NO: 6686 - DNA, 25 bp, Homo sapiens
  source 1..25: mol_type = genomic DNA
aattgggttcataatttctgaatat

SEQ ID NO: 6687 - DNA, 25 bp, Homo sapiens
  source 1..25: mol_type = genomic DNA
attgggttcataatttctgaatatt

SEQ ID NO: 6688 - DNA, 25 bp, Homo sapiens
  source 1..25: mol_type = genomic DNA
ttgggttcataatttctgaatattt

SEQ ID NO: 6689 - DNA, 25 bp, Homo sapiens
  source 1..25: mol_type = genomic DNA
tgggttcataatttctgaatattta

SEQ ID NO: 6690 - DNA, 25 bp, Homo sapiens
  source 1..25: mol_type = genomic DNA
gggttcataatttctgaatatttag

SEQ ID NO: 6691 - DNA, 25 bp, Homo sapiens
  source 1..25: mol_type = genomic DNA
ggttcataatttctgaatatttaga

SEQ ID NO: 6692 - DNA, 25 bp, Homo sapiens
  source 1..25: mol_type = genomic DNA
gttcataatttctgaatatttagat

SEQ ID NO: 6693 - DNA, 25 bp, Homo sapiens
  source 1..25: mol_type = genomic DNA
ttcataatttctgaatatttagatg

SEQ ID NO: 6694 - DNA, 25 bp, Homo sapiens
  source 1..25: mol_type = genomic DNA
tcataatttctgaatatttagatgg

SEQ ID NO: 6695 - DNA, 25 bp, Homo sapiens
  source 1..25: mol_type = genomic DNA
cataatttctgaatatttagatgga

SEQ ID NO: 6696 - DNA, 25 bp, Homo sapiens
  source 1..25: mol_type = genomic DNA
ataatttctgaatatttagatggat

SEQ ID NO: 6697 - DNA, 25 bp, Homo sapiens
  source 1..25: mol_type = genomic DNA
taatttctgaatatttagatggatg

SEQ ID NO: 6698 - DNA, 25 bp, Homo sapiens
  source 1..25: mol_type = genomic DNA
aatttctgaatatttagatggatgg

SEQ ID NO: 6699 - DNA, 25 bp, Homo sapiens
  source 1..25: mol_type = genomic DNA
atttctgaatatttagatggatggt

SEQ ID NO: 6700 - DNA, 25 bp, Homo sapiens
  source 1..25: mol_type = genomic DNA
tttctgaatatttagatggatggtt

SEQ ID NO: 6701 - DNA, 25 bp, Homo sapiens
  source 1..25: mol_type = genomic DNA
ttctgaatatttagatggatggttg

SEQ ID NO: 6702 - DNA, 25 bp, Homo sapiens
  source 1..25: mol_type = genomic DNA
tctgaatatttagatggatggttgt

SEQ ID NO: 6703 - DNA, 25 bp, Homo sapiens
  source 1..25: mol_type = genomic DNA
ctgaatatttagatggatggttgtg

SEQ ID NO: 6704 - DNA, 25 bp, Homo sapiens
  source 1..25: mol_type = genomic DNA
tgaatatttagatggatggttgtga

SEQ ID NO: 6705 - DNA, 25 bp, Homo sapiens
  source 1..25: mol_type = genomic DNA
gaatatttagatggatggttgtgag

SEQ ID NO: 6706 - DNA, 25 bp, Homo sapiens
  source 1..25: mol_type = genomic DNA
aatatttagatggatggttgtgagt

SEQ ID NO: 6707 - DNA, 25 bp, Homo sapiens
  source 1..25: mol_type = genomic DNA
atatttagatggatggttgtgagtg

SEQ ID NO: 6708 - DNA, 25 bp, Homo sapiens
  source 1..25: mol_type = genomic DNA
tatttagatggatggttgtgagtgg

SEQ ID NO: 6709 - DNA, 25 bp, Homo sapiens
  source 1..25: mol_type = genomic DNA
atttagatggatggttgtgagtggc

SEQ ID NO: 6710 - DNA, 25 bp, Homo sapiens
  source 1..25: mol_type = genomic DNA
tttagatggatggttgtgagtggct

SEQ ID NO: 6711 - DNA, 25 bp, Homo sapiens
  source 1..25: mol_type = genomic DNA
ttagatggatggttgtgagtggctg

SEQ ID NO: 6712 - DNA, 25 bp, Homo sapiens
  source 1..25: mol_type = genomic DNA
tagatggatggttgtgagtggctgg

SEQ ID NO: 6713 - DNA, 25 bp, Homo sapiens
  source 1..25: mol_type = genomic DNA
agatggatggttgtgagtggctggt

SEQ ID NO: 6714 - DNA, 25 bp, Homo sapiens
  source 1..25: mol_type = genomic DNA
gatggatggttgtgagtggctggtg

SEQ ID NO: 6715 - DNA, 25 bp, Homo sapiens
  source 1..25: mol_type = genomic DNA
atggatggttgtgagtggctggtgg

SEQ ID NO: 6716 - DNA, 25 bp, Homo sapiens
  source 1..25: mol_type = genomic DNA
tggatggttgtgagtggctggtgga

SEQ ID NO: 6717 - DNA, 25 bp, Homo sapiens
  source 1..25: mol_type = genomic DNA
ggatggttgtgagtggctggtggac

SEQ ID NO: 6718 - DNA, 25 bp, Homo sapiens
  source 1..25: mol_type = genomic DNA
gatggttgtgagtggctggtggaca

SEQ ID NO: 6719 - DNA, 25 bp, Homo sapiens
  source 1..25: mol_type = genomic DNA
atggttgtgagtggctggtggacag

SEQ ID NO: 6720 - DNA, 25 bp, Homo sapiens
  source 1..25: mol_type = genomic DNA
tggttgtgagtggctggtggacaga

SEQ ID NO: 6721 - DNA, 25 bp, Homo sapiens
  source 1..25: mol_type = genomic DNA
ggttgtgagtggctggtggacagac

SEQ ID NO: 6722 - DNA, 25 bp, Homo sapiens
  source 1..25: mol_type = genomic DNA
gttgtgagtggctggtggacagacg

SEQ ID NO: 6723 - DNA, 25 bp, Homo sapiens
  source 1..25: mol_type = genomic DNA
ttgtgagtggctggtggacagacga

SEQ ID NO: 6724 - DNA, 25 bp, Homo sapiens
  source 1..25: mol_type = genomic DNA
tgtgagtggctggtggacagacgaa

SEQ ID NO: 6725 - DNA, 25 bp, Homo sapiens
  source 1..25: mol_type = genomic DNA
gtgagtggctggtggacagacgaaa

SEQ ID NO: 6726 - DNA, 25 bp, Homo sapiens
  source 1..25: mol_type = genomic DNA
tgagtggctggtggacagacgaaaa

SEQ ID NO: 6727 - DNA, 25 bp, Homo sapiens
  source 1..25: mol_type = genomic DNA
gagtggctggtggacagacgaaaaa

SEQ ID NO: 6728 - DNA, 25 bp, Homo sapiens
  source 1..25: mol_type = genomic DNA
agtggctggtggacagacgaaaaat

SEQ ID NO: 6729 - DNA, 25 bp, Homo sapiens
  source 1..25: mol_type = genomic DNA
gtggctggtggacagacgaaaaatg

SEQ ID NO: 6730 - DNA, 25 bp, Homo sapiens
  source 1..25: mol_type = genomic DNA
tggctggtggacagacgaaaaatgg

SEQ ID NO: 6731 - DNA, 25 bp, Homo sapiens
  source 1..25: mol_type = genomic DNA
ggctggtggacagacgaaaaatgga

SEQ ID NO: 6732 - DNA, 25 bp, Homo sapiens
  source 1..25: mol_type = genomic DNA
gctggtggacagacgaaaaatggat

SEQ ID NO: 6733 - DNA, 25 bp, Homo sapiens
  source 1..25: mol_type = genomic DNA
ctggtggacagacgaaaaatggatg

SEQ ID NO: 6734 - DNA, 25 bp, Homo sapiens
  source 1..25: mol_type = genomic DNA
tggtggacagacgaaaaatggatgg

SEQ ID NO: 6735 - DNA, 25 bp, Homo sapiens
  source 1..25: mol_type = genomic DNA
ggtggacagacgaaaaatggatggt

SEQ ID NO: 6736 - DNA, 25 bp, Homo sapiens
  source 1..25: mol_type = genomic DNA
gtggacagacgaaaaatggatggtt

SEQ ID NO: 6737 - DNA, 25 bp, Homo sapiens
  source 1..25: mol_type = genomic DNA
tggacagacgaaaaatggatggttg

SEQ ID NO: 6738 - DNA, 25 bp, Homo sapiens
  source 1..25: mol_type = genomic DNA
ggacagacgaaaaatggatggttgg

SEQ ID NO: 6739 - DNA, 25 bp, Homo sapiens
  source 1..25: mol_type = genomic DNA
gacagacgaaaaatggatggttgga

SEQ ID NO: 6740 - DNA, 25 bp, Homo sapiens
  source 1..25: mol_type = genomic DNA
acagacgaaaaatggatggttggat

SEQ ID NO: 6741 - DNA, 25 bp, Homo sapiens
  source 1..25: mol_type = genomic DNA
cagacgaaaaatggatggttggata

SEQ ID NO: 6742 - DNA, 25 bp, Homo sapiens
  source 1..25: mol_type = genomic DNA
agacgaaaaatggatggttggataa

SEQ ID NO: 6743 - DNA, 25 bp, Homo sapiens
  source 1..25: mol_type = genomic DNA
gacgaaaaatggatggttggataaa

SEQ ID NO: 6744 - DNA, 25 bp, Homo sapiens
  source 1..25: mol_type = genomic DNA
acgaaaaatggatggttggataaat

SEQ ID NO: 6745 - DNA, 25 bp, Homo sapiens
  source 1..25: mol_type = genomic DNA
cgaaaaatggatggttggataaatt

SEQ ID NO: 6746 - DNA, 25 bp, Homo sapiens
  source 1..25: mol_type = genomic DNA
gaaaaatggatggttggataaattg

SEQ ID NO: 6747 - DNA, 25 bp, Homo sapiens
  source 1..25: mol_type = genomic DNA
aaaaatggatggttggataaattga

SEQ ID NO: 6748 - DNA, 25 bp, Homo sapiens
  source 1..25: mol_type = genomic DNA
aaaatggatggttggataaattgat

SEQ ID NO: 6749 - DNA, 25 bp, Homo sapiens
  source 1..25: mol_type = genomic DNA
aaatggatggttggataaattgatg

SEQ ID NO: 6750 - DNA, 25 bp, Homo sapiens
  source 1..25: mol_type = genomic DNA
aatggatggttggataaattgatgg

SEQ ID NO: 6751 - DNA, 25 bp, Homo sapiens
  source 1..25: mol_type = genomic DNA
atggatggttggataaattgatggg

SEQ ID NO: 6752 - DNA, 25 bp, Homo sapiens
  source 1..25: mol_type = genomic DNA
tggatggttggataaattgatgggt

SEQ ID NO: 6753 - DNA, 25 bp, Homo sapiens
  source 1..25: mol_type = genomic DNA
ggatggttggataaattgatgggtg

SEQ ID NO: 6754 - DNA, 25 bp, Homo sapiens
  source 1..25: mol_type = genomic DNA
gatggttggataaattgatgggtgg

SEQ ID NO: 6755 - DNA, 25 bp, Homo sapiens
  source 1..25: mol_type = genomic DNA
atggttggataaattgatgggtgga

SEQ ID NO: 6756 - DNA, 25 bp, Homo sapiens
  source 1..25: mol_type = genomic DNA
tggttggataaattgatgggtggat

SEQ ID NO: 6757 - DNA, 25 bp, Homo sapiens
  source 1..25: mol_type = genomic DNA
ggttggataaattgatgggtggatg

SEQ ID NO: 6758 - DNA, 25 bp, Homo sapiens
  source 1..25: mol_type = genomic DNA
gttggataaattgatgggtggatgg

SEQ ID NO: 6759 - DNA, 25 bp, Homo sapiens
  source 1..25: mol_type = genomic DNA
ttggataaattgatgggtggatgga

SEQ ID NO: 6760 - DNA, 25 bp, Homo sapiens
  source 1..25: mol_type = genomic DNA
tggataaattgatgggtggatggat

SEQ ID NO: 6761 - DNA, 25 bp, Homo sapiens
  source 1..25: mol_type = genomic DNA
ggataaattgatgggtggatggatg

SEQ ID NO: 6762 - DNA, 25 bp, Homo sapiens
  source 1..25: mol_type = genomic DNA
gataaattgatgggtggatggatgg

SEQ ID NO: 6763 - DNA, 25 bp, Homo sapiens
  source 1..25: mol_type = genomic DNA
ataaattgatgggtggatggatggt

SEQ ID NO: 6764 - DNA, 25 bp, Homo sapiens
  source 1..25: mol_type = genomic DNA
taaattgatgggtggatggatggtt

SEQ ID NO: 6765 - DNA, 25 bp, Homo sapiens
  source 1..25: mol_type = genomic DNA
aaattgatgggtggatggatggttg

SEQ ID NO: 6766 - DNA, 25 bp, Homo sapiens
  source 1..25: mol_type = genomic DNA
aattgatgggtggatggatggttgg

SEQ ID NO: 6767 - DNA, 25 bp, Homo sapiens
  source 1..25: mol_type = genomic DNA
attgatgggtggatggatggttggt

SEQ ID NO: 6768 - DNA, 25 bp, Homo sapiens
  source 1..25: mol_type = genomic DNA
ttgatgggtggatggatggttggtt

SEQ ID NO: 6769 - DNA, 25 bp, Homo sapiens
  source 1..25: mol_type = genomic DNA
tgatgggtggatggatggttggttg

SEQ ID NO: 6770 - DNA, 25 bp, Homo sapiens
  source 1..25: mol_type = genomic DNA
gatgggtggatggatggttggttgt

SEQ ID NO: 6771 - DNA, 25 bp, Homo sapiens
  source 1..25: mol_type = genomic DNA
atgggtggatggatggttggttgta

SEQ ID NO: 6772 - DNA, 25 bp, Homo sapiens
  source 1..25: mol_type = genomic DNA
tgggtggatggatggttggttgtat

SEQ ID NO: 6773 - DNA, 25 bp, Homo sapiens
  source 1..25: mol_type = genomic DNA
gggtggatggatggttggttgtatg

SEQ ID NO: 6774 - DNA, 25 bp, Homo sapiens
  source 1..25: mol_type = genomic DNA
ggtggatggatggttggttgtatga

SEQ ID NO: 6775 - DNA, 25 bp, Homo sapiens
  source 1..25: mol_type = genomic DNA
gtggatggatggttggttgtatgaa

SEQ ID NO: 6776 - DNA, 25 bp, Homo sapiens
  source 1..25: mol_type = genomic DNA
tggatggatggttggttgtatgaaa

SEQ ID NO: 6777 - DNA, 25 bp, Homo sapiens
  source 1..25: mol_type = genomic DNA
ggatggatggttggttgtatgaaag

SEQ ID NO: 6778 - DNA, 25 bp, Homo sapiens
  source 1..25: mol_type = genomic DNA
gatggatggttggttgtatgaaaga

SEQ ID NO: 6779 - DNA, 25 bp, Homo sapiens
  source 1..25: mol_type = genomic DNA
atggatggttggttgtatgaaagaa

SEQ ID NO: 6780 - DNA, 25 bp, Homo sapiens
  source 1..25: mol_type = genomic DNA
tggatggttggttgtatgaaagaat

SEQ ID NO: 6781 - DNA, 25 bp, Homo sapiens
  source 1..25: mol_type = genomic DNA
ggatggttggttgtatgaaagaatg

SEQ ID NO: 6782 - DNA, 25 bp, Homo sapiens
  source 1..25: mol_type = genomic DNA
gatggttggttgtatgaaagaatga

SEQ ID NO: 6783 - DNA, 25 bp, Homo sapiens
  source 1..25: mol_type = genomic DNA
atggttggttgtatgaaagaatgaa

SEQ ID NO: 6784 - DNA, 25 bp, Homo sapiens
  source 1..25: mol_type = genomic DNA
tggttggttgtatgaaagaatgaat

SEQ ID NO: 6785 - DNA, 25 bp, Homo sapiens
  source 1..25: mol_type = genomic DNA
ggttggttgtatgaaagaatgaatg

SEQ ID NO: 6786 - DNA, 25 bp, Homo sapiens
  source 1..25: mol_type = genomic DNA
gttggttgtatgaaagaatgaatga

SEQ ID NO: 6787 - DNA, 25 bp, Homo sapiens
  source 1..25: mol_type = genomic DNA
ttggttgtatgaaagaatgaatgat

SEQ ID NO: 6788 - DNA, 25 bp, Homo sapiens
  source 1..25: mol_type = genomic DNA
tggttgtatgaaagaatgaatgatt

SEQ ID NO: 6789 - DNA, 25 bp, Homo sapiens
  source 1..25: mol_type = genomic DNA
ggttgtatgaaagaatgaatgattg

SEQ ID NO: 6790 - DNA, 25 bp, Homo sapiens
  source 1..25: mol_type = genomic DNA
gttgtatgaaagaatgaatgattgg

SEQ ID NO: 6791 - DNA, 25 bp, Homo sapiens
  source 1..25: mol_type = genomic DNA
ttgtatgaaagaatgaatgattggg

SEQ ID NO: 6792 - DNA, 25 bp, Homo sapiens
  source 1..25: mol_type = genomic DNA
tgtatgaaagaatgaatgattgggt

SEQ ID NO: 6793 - DNA, 25 bp, Homo sapiens
  source 1..25: mol_type = genomic DNA
gtatgaaagaatgaatgattgggta

SEQ ID NO: 6794 - DNA, 25 bp, Homo sapiens
  source 1..25: mol_type = genomic DNA
tatgaaagaatgaatgattgggtag

SEQ ID NO: 6795 - DNA, 25 bp, Homo sapiens
  source 1..25: mol_type = genomic DNA
atgaaagaatgaatgattgggtagg

SEQ ID NO: 6796 - DNA, 25 bp, Homo sapiens
  source 1..25: mol_type = genomic DNA
tgaaagaatgaatgattgggtaggt

SEQ ID NO: 6797 - DNA, 25 bp, Homo sapiens
  source 1..25: mol_type = genomic DNA
gaaagaatgaatgattgggtaggtg

SEQ ID NO: 6798 - DNA, 25 bp, Homo sapiens
  source 1..25: mol_type = genomic DNA
aaagaatgaatgattgggtaggtgg

SEQ ID NO: 6799 - DNA, 25 bp, Homo sapiens
  source 1..25: mol_type = genomic DNA
aagaatgaatgattgggtaggtgga

SEQ ID NO: 6800 - DNA, 25 bp, Homo sapiens
  source 1..25: mol_type = genomic DNA
agaatgaatgattgggtaggtggat

SEQ ID NO: 6801 - DNA, 25 bp, Homo sapiens
  source 1..25: mol_type = genomic DNA
gaatgaatgattgggtaggtggatt

SEQ ID NO: 6802 - DNA, 25 bp, Homo sapiens
  source 1..25: mol_type = genomic DNA
aatgaatgattgggtaggtggatta

SEQ ID NO: 6803 - DNA, 25 bp, Homo sapiens
  source 1..25: mol_type = genomic DNA
atgaatgattgggtaggtggattaa

SEQ ID NO: 6804 - DNA, 25 bp, Homo sapiens
  source 1..25: mol_type = genomic DNA
tgaatgattgggtaggtggattaag

SEQ ID NO: 6805 - DNA, 25 bp, Homo sapiens
  source 1..25: mol_type = genomic DNA
gaatgattgggtaggtggattaagt

SEQ ID NO: 6806 - DNA, 25 bp, Homo sapiens
  source 1..25: mol_type = genomic DNA
aatgattgggtaggtggattaagtt

SEQ ID NO: 6807 - DNA, 25 bp, Homo sapiens
  source 1..25: mol_type = genomic DNA
atgattgggtaggtggattaagttg

SEQ ID NO: 6808 - DNA, 25 bp, Homo sapiens
  source 1..25: mol_type = genomic DNA
tgattgggtaggtggattaagttgc

SEQ ID NO: 6809 - DNA, 25 bp, Homo sapiens
  source 1..25: mol_type = genomic DNA
gattgggtaggtggattaagttgcg

SEQ ID NO: 6810 - DNA, 25 bp, Homo sapiens
  source 1..25: mol_type = genomic DNA
attgggtaggtggattaagttgcgg

SEQ ID NO: 6811 - DNA, 25 bp, Homo sapiens
  source 1..25: mol_type = genomic DNA
ttgggtaggtggattaagttgcgga

SEQ ID NO: 6812 - DNA, 25 bp, Homo sapiens
  source 1..25: mol_type = genomic DNA
tgggtaggtggattaagttgcggat

SEQ ID NO: 6813 - DNA, 25 bp, Homo sapiens
  source 1..25: mol_type = genomic DNA
gggtaggtggattaagttgcggatc

SEQ ID NO: 6814 - DNA, 25 bp, Homo sapiens
  source 1..25: mol_type = genomic DNA
ggtaggtggattaagttgcggatca

SEQ ID NO: 6815 - DNA, 25 bp, Homo sapiens
  source 1..25: mol_type = genomic DNA
gtaggtggattaagttgcggatcaa

SEQ ID NO: 6816 - DNA, 25 bp, Homo sapiens
  source 1..25: mol_type = genomic DNA
taggtggattaagttgcggatcaat

SEQ ID NO: 6817 - DNA, 25 bp, Homo sapiens
  source 1..25: mol_type = genomic DNA
aggtggattaagttgcggatcaatg

SEQ ID NO: 6818 - DNA, 25 bp, Homo sapiens
  source 1..25: mol_type = genomic DNA
ggtggattaagttgcggatcaatgt

SEQ ID NO: 6819 - DNA, 25 bp, Homo sapiens
  source 1..25: mol_type = genomic DNA
gtggattaagttgcggatcaatgta

SEQ ID NO: 6820 - DNA, 25 bp, Homo sapiens
  source 1..25: mol_type = genomic DNA
tggattaagttgcggatcaatgtat

SEQ ID NO: 6821 - DNA, 25 bp, Homo sapiens
  source 1..25: mol_type = genomic DNA
ggattaagttgcggatcaatgtatg

SEQ ID NO: 6822 - DNA, 25 bp, Homo sapiens
  source 1..25: mol_type = genomic DNA
gattaagttgcggatcaatgtatgg

SEQ ID NO: 6823 - DNA, 25 bp, Homo sapiens
  source 1..25: mol_type = genomic DNA
attaagttgcggatcaatgtatggg

SEQ ID NO: 6824 - DNA, 25 bp, Homo sapiens
  source 1..25: mol_type = genomic DNA
ttaagttgcggatcaatgtatggga

SEQ ID NO: 6825 - DNA, 25 bp, Homo sapiens
  source 1..25: mol_type = genomic DNA
taagttgcggatcaatgtatgggat

SEQ ID NO: 6826 - DNA, 25 bp, Homo sapiens
  source 1..25: mol_type = genomic DNA
aagttgcggatcaatgtatgggatg

SEQ ID NO: 6827 - DNA, 25 bp, Homo sapiens
  source 1..25: mol_type = genomic DNA
agttgcggatcaatgtatgggatgg

SEQ ID NO: 6828 - DNA, 25 bp, Homo sapiens
  source 1..25: mol_type = genomic DNA
gttgcggatcaatgtatgggatgga

SEQ ID NO: 6829 - DNA, 25 bp, Homo sapiens
  source 1..25: mol_type = genomic DNA
ttgcggatcaatgtatgggatggat

SEQ ID NO: 6830 - DNA, 25 bp, Homo sapiens
  source 1..25: mol_type = genomic DNA
tgcggatcaatgtatgggatggatg

SEQ ID NO: 6831 - DNA, 25 bp, Homo sapiens
  source 1..25: mol_type = genomic DNA
gcggatcaatgtatgggatggatga

SEQ ID NO: 6832 - DNA, 25 bp, Homo sapiens
  source 1..25: mol_type = genomic DNA
cggatcaatgtatgggatggatgaa

SEQ ID NO: 6833 - DNA, 25 bp, Homo sapiens
  source 1..25: mol_type = genomic DNA
ggatcaatgtatgggatggatgaat

SEQ ID NO: 6834 - DNA, 25 bp, Homo sapiens
  source 1..25: mol_type = genomic DNA
gatcaatgtatgggatggatgaatg

SEQ ID NO: 6835 - DNA, 25 bp, Homo sapiens
  source 1..25: mol_type = genomic DNA
atcaatgtatgggatggatgaatgg

SEQ ID NO: 6836 - DNA, 25 bp, Homo sapiens
  source 1..25: mol_type = genomic DNA
tcaatgtatgggatggatgaatgga

SEQ ID NO: 6837 - DNA, 25 bp, Homo sapiens
  source 1..25: mol_type = genomic DNA
caatgtatgggatggatgaatggat

SEQ ID NO: 6838 - DNA, 25 bp, Homo sapiens
  source 1..25: mol_type = genomic DNA
aatgtatgggatggatgaatggatg

SEQ ID NO: 6839 - DNA, 25 bp, Homo sapiens
  source 1..25: mol_type = genomic DNA
atgtatgggatggatgaatggatgg

SEQ ID NO: 6840 - DNA, 25 bp, Homo sapiens
  source 1..25: mol_type = genomic DNA
tgtatgggatggatgaatggatgga

SEQ ID NO: 6841 - DNA, 25 bp, Homo sapiens
  source 1..25: mol_type = genomic DNA
gtatgggatggatgaatggatggat

SEQ ID NO: 6842 - DNA, 25 bp, Homo sapiens
  source 1..25: mol_type = genomic DNA
tatgggatggatgaatggatggatg

SEQ ID NO: 6843 - DNA, 25 bp, Homo sapiens
  source 1..25: mol_type = genomic DNA
atgggatggatgaatggatggatgg

SEQ ID NO: 6844 - DNA, 25 bp, Homo sapiens
  source 1..25: mol_type = genomic DNA
tgggatggatgaatggatggatgga

SEQ ID NO: 6845 - DNA, 25 bp, Homo sapiens
  source 1..25: mol_type = genomic DNA
gggatggatgaatggatggatggat

SEQ ID NO: 6846 - DNA, 25 bp, Homo sapiens
  source 1..25: mol_type = genomic DNA
ggatggatgaatggatggatggatg

SEQ ID NO: 6847 - DNA, 25 bp, Homo sapiens
  source 1..25: mol_type = genomic DNA
gatggatgaatggatggatggatgg

SEQ ID NO: 6848 - DNA, 25 bp, Homo sapiens
  source 1..25: mol_type = genomic DNA
atggatgaatggatggatggatgga

SEQ ID NO: 6849 - DNA, 25 bp, Homo sapiens
  source 1..25: mol_type = genomic DNA
tggatgaatggatggatggatggat

SEQ ID NO: 6850 - DNA, 25 bp, Homo sapiens
  source 1..25: mol_type = genomic DNA
ggatgaatggatggatggatggatg

SEQ ID NO: 6851 - DNA, 25 bp, Homo sapiens
  source 1..25: mol_type = genomic DNA
gatgaatggatggatggatggatgt

SEQ ID NO: 6852 - DNA, 25 bp, Homo sapiens
  source 1..25: mol_type = genomic DNA
atgaatggatggatggatggatgtg

SEQ ID NO: 6853 - DNA, 25 bp, Homo sapiens
  source 1..25: mol_type = genomic DNA
tgaatggatggatggatggatgtgt

SEQ ID NO: 6854 - DNA, 25 bp, Homo sapiens
  source 1..25: mol_type = genomic DNA
gaatggatggatggatggatgtgtg

SEQ ID NO: 6855 - DNA, 25 bp, Homo sapiens
  source 1..25: mol_type = genomic DNA
aatggatggatggatggatgtgtgg

SEQ ID NO: 6856 - DNA, 25 bp, Homo sapiens
  source 1..25: mol_type = genomic DNA
atggatggatggatggatgtgtggt

SEQ ID NO: 6857 - DNA, 25 bp, Homo sapiens
  source 1..25: mol_type = genomic DNA
tggatggatggatggatgtgtggtt

SEQ ID NO: 6858 - DNA, 25 bp, Homo sapiens
  source 1..25: mol_type = genomic DNA
ggatggatggatggatgtgtggttg

SEQ ID NO: 6859 - DNA, 25 bp, Homo sapiens
  source 1..25: mol_type = genomic DNA
gatggatggatggatgtgtggttga

SEQ ID NO: 6860 - DNA, 25 bp, Homo sapiens
  source 1..25: mol_type = genomic DNA
atggatggatggatgtgtggttgaa

SEQ ID NO: 6861 - DNA, 25 bp, Homo sapiens
  source 1..25: mol_type = genomic DNA
tggatggatggatgtgtggttgaat

SEQ ID NO: 6862 - DNA, 25 bp, Homo sapiens
  source 1..25: mol_type = genomic DNA
ggatggatggatgtgtggttgaatt

SEQ ID NO: 6863 - DNA, 25 bp, Homo sapiens
  source 1..25: mol_type = genomic DNA
gatggatggatgtgtggttgaatta

SEQ ID NO: 6864 - DNA, 25 bp, Homo sapiens
  source 1..25: mol_type = genomic DNA
atggatggatgtgtggttgaattac

SEQ ID NO: 6865 - DNA, 25 bp, Homo sapiens
  source 1..25: mol_type = genomic DNA
tggatggatgtgtggttgaattact

SEQ ID NO: 6866 - DNA, 25 bp, Homo sapiens
  source 1..25: mol_type = genomic DNA
ggatggatgtgtggttgaattactg

SEQ ID NO: 6867 - DNA, 25 bp, Homo sapiens
  source 1..25: mol_type = genomic DNA
gatggatgtgtggttgaattactga

SEQ ID NO: 6868 - DNA, 25 bp, Homo sapiens
  source 1..25: mol_type = genomic DNA
atggatgtgtggttgaattactgaa

SEQ ID NO: 6869 - DNA, 25 bp, Homo sapiens
  source 1..25: mol_type = genomic DNA
tggatgtgtggttgaattactgaaa

SEQ ID NO: 6870 - DNA, 25 bp, Homo sapiens
  source 1..25: mol_type = genomic DNA
ggatgtgtggttgaattactgaaag

SEQ ID NO: 6871 - DNA, 25 bp, Homo sapiens
  source 1..25: mol_type = genomic DNA
gatgtgtggttgaattactgaaagg

SEQ ID NO: 6872 - DNA, 25 bp, Homo sapiens
  source 1..25: mol_type = genomic DNA
atgtgtggttgaattactgaaaggt

SEQ ID NO: 6873 - DNA, 25 bp, Homo sapiens
  source 1..25: mol_type = genomic DNA
tgtgtggttgaattactgaaaggtt

SEQ ID NO: 6874 - DNA, 25 bp, Homo sapiens
  source 1..25: mol_type = genomic DNA
gtgtggttgaattactgaaaggttg

SEQ ID NO: 6875 - DNA, 25 bp, Homo sapiens
  source 1..25: mol_type = genomic DNA
tgtggttgaattactgaaaggttgg

SEQ ID NO: 6876 - DNA, 25 bp, Homo sapiens
  source 1..25: mol_type = genomic DNA
gtggttgaattactgaaaggttgga

SEQ ID NO: 6877 - DNA, 25 bp, Homo sapiens
  source 1..25: mol_type = genomic DNA
tggttgaattactgaaaggttggaa

SEQ ID NO: 6878 - DNA, 25 bp, Homo sapiens
  source 1..25: mol_type = genomic DNA
ggttgaattactgaaaggttggaag

SEQ ID NO: 6879 - DNA, 25 bp, Homo sapiens
  source 1..25: mol_type = genomic DNA
gttgaattactgaaaggttggaaga

SEQ ID NO: 6880 - DNA, 25 bp, Homo sapiens
  source 1..25: mol_type = genomic DNA
ttgaattactgaaaggttggaagag

SEQ ID NO: 6881 - DNA, 25 bp, Homo sapiens
  source 1..25: mol_type = genomic DNA
tgaattactgaaaggttggaagagt

SEQ ID NO: 6882 - DNA, 25 bp, Homo sapiens
  source 1..25: mol_type = genomic DNA
gaattactgaaaggttggaagagtg

SEQ ID NO: 6883 - DNA, 25 bp, Homo sapiens
  source 1..25: mol_type = genomic DNA
aattactgaaaggttggaagagtgg

SEQ ID NO: 6884 - DNA, 25 bp, Homo sapiens
  source 1..25: mol_type = genomic DNA
attactgaaaggttggaagagtgga

SEQ ID NO: 6885 - DNA, 25 bp, Homo sapiens
  source 1..25: mol_type = genomic DNA
ttactgaaaggttggaagagtggat

SEQ ID NO: 6886 - DNA, 25 bp, Homo sapiens
  source 1..25: mol_type = genomic DNA
tactgaaaggttggaagagtggatg

SEQ ID NO: 6887 - DNA, 25 bp, Homo sapiens
  source 1..25: mol_type = genomic DNA
actgaaaggttggaagagtggatgg

SEQ ID NO: 6888 - DNA, 25 bp, Homo sapiens
  source 1..25: mol_type = genomic DNA
ctgaaaggttggaagagtggatggg

SEQ ID NO: 6889 - DNA, 25 bp, Homo sapiens
  source 1..25: mol_type = genomic DNA
tgaaaggttggaagagtggatgggt

SEQ ID NO: 6890 - DNA, 25 bp, Homo sapiens
  source 1..25: mol_type = genomic DNA
gaaaggttggaagagtggatgggtg

SEQ ID NO: 6891 - DNA, 25 bp, Homo sapiens
  source 1..25: mol_type = genomic DNA
aaaggttggaagagtggatgggtga

SEQ ID NO: 6892 - DNA, 25 bp, Homo sapiens
  source 1..25: mol_type = genomic DNA
aaggttggaagagtggatgggtgaa

SEQ ID NO: 6893 - DNA, 25 bp, Homo sapiens
  source 1..25: mol_type = genomic DNA
aggttggaagagtggatgggtgaaa

SEQ ID NO: 6894 - DNA, 25 bp, Homo sapiens
  source 1..25: mol_type = genomic DNA
ggttggaagagtggatgggtgaaat

SEQ ID NO: 6895 - DNA, 25 bp, Homo sapiens
  source 1..25: mol_type = genomic DNA
gttggaagagtggatgggtgaaatt

SEQ ID NO: 6896 - DNA, 25 bp, Homo sapiens
  source 1..25: mol_type = genomic DNA
ttggaagagtggatgggtgaaattt

SEQ ID NO: 6897 - DNA, 25 bp, Homo sapiens
  source 1..25: mol_type = genomic DNA
tggaagagtggatgggtgaaatttg

SEQ ID NO: 6898 - DNA, 25 bp, Homo sapiens
  source 1..25: mol_type = genomic DNA
ggaagagtggatgggtgaaatttgg

SEQ ID NO: 6899 - DNA, 25 bp, Homo sapiens
  source 1..25: mol_type = genomic DNA
gaagagtggatgggtgaaatttggg

SEQ ID NO: 6900 - DNA, 25 bp, Homo sapiens
  source 1..25: mol_type = genomic DNA
aagagtggatgggtgaaatttgggg

SEQ ID NO: 6901 - DNA, 25 bp, Homo sapiens
  source 1..25: mol_type = genomic DNA
agagtggatgggtgaaatttggggt

SEQ ID NO: 6902 - DNA, 25 bp, Homo sapiens
  source 1..25: mol_type = genomic DNA
gagtggatgggtgaaatttggggta

SEQ ID NO: 6903 - DNA, 25 bp, Homo sapiens
  source 1..25: mol_type = genomic DNA
agtggatgggtgaaatttggggtag

SEQ ID NO: 6904 - DNA, 25 bp, Homo sapiens
  source 1..25: mol_type = genomic DNA
gtggatgggtgaaatttggggtagt

SEQ ID NO: 6905 - DNA, 25 bp, Homo sapiens
  source 1..25: mol_type = genomic DNA
tggatgggtgaaatttggggtagtt

SEQ ID NO: 6906 - DNA, 25 bp, Homo sapiens
  source 1..25: mol_type = genomic DNA
ggatgggtgaaatttggggtagtta

SEQ ID NO: 6907 - DNA, 25 bp, Homo sapiens
  source 1..25: mol_type = genomic DNA
gatgggtgaaatttggggtagttag

SEQ ID NO: 6908 - DNA, 25 bp, Homo sapiens
  source 1..25: mol_type = genomic DNA
atgggtgaaatttggggtagttaga

SEQ ID NO: 6909 - DNA, 25 bp, Homo sapiens
  source 1..25: mol_type = genomic DNA
tgggtgaaatttggggtagttagat

SEQ ID NO: 6910 - DNA, 25 bp, Homo sapiens
  source 1..25: mol_type = genomic DNA
gggtgaaatttggggtagttagatg

SEQ ID NO: 6911 - DNA, 25 bp, Homo sapiens
  source 1..25: mol_type = genomic DNA
ggtgaaatttggggtagttagatgg

SEQ ID NO: 6912 - DNA, 25 bp, Homo sapiens
  source 1..25: mol_type = genomic DNA
gtgaaatttggggtagttagatggg

SEQ ID NO: 6913 - DNA, 25 bp, Homo sapiens
  source 1..25: mol_type = genomic DNA
tgaaatttggggtagttagatgggt

SEQ ID NO: 6914 - DNA, 25 bp, Homo sapiens
  source 1..25: mol_type = genomic DNA
gaaatttggggtagttagatgggtg

SEQ ID NO: 6915 - DNA, 25 bp, Homo sapiens
  source 1..25: mol_type = genomic DNA
aaatttggggtagttagatgggtgg

SEQ ID NO: 6916 - DNA, 25 bp, Homo sapiens
  source 1..25: mol_type = genomic DNA
aatttggggtagttagatgggtggg

SEQ ID NO: 6917 - DNA, 25 bp, Homo sapiens
  source 1..25: mol_type = genomic DNA
atttggggtagttagatgggtgggt

SEQ ID NO: 6918 - DNA, 25 bp, Homo sapiens
  source 1..25: mol_type = genomic DNA
tttggggtagttagatgggtgggtg

SEQ ID NO: 6919 - DNA, 25 bp, Homo sapiens
  source 1..25: mol_type = genomic DNA
ttggggtagttagatgggtgggtgt

SEQ ID NO: 6920 - DNA, 25 bp, Homo sapiens
  source 1..25: mol_type = genomic DNA
tggggtagttagatgggtgggtgtg

SEQ ID NO: 6921 - DNA, 25 bp, Homo sapiens
  source 1..25: mol_type = genomic DNA
ggggtagttagatgggtgggtgtgt

SEQ ID NO: 6922 - DNA, 25 bp, Homo sapiens
  source 1..25: mol_type = genomic DNA
gggtagttagatgggtgggtgtgtg

SEQ ID NO: 6923 - DNA, 25 bp, Homo sapiens
  source 1..25: mol_type = genomic DNA
ggtagttagatgggtgggtgtgtgg

SEQ ID NO: 6924 - DNA, 25 bp, Homo sapiens
  source 1..25: mol_type = genomic DNA
gtagttagatgggtgggtgtgtgga

SEQ ID NO: 6925 - DNA, 25 bp, Homo sapiens
  source 1..25: mol_type = genomic DNA
tagttagatgggtgggtgtgtggat

SEQ ID NO: 6926 - DNA, 25 bp, Homo sapiens
  source 1..25: mol_type = genomic DNA
agttagatgggtgggtgtgtggatg

SEQ ID NO: 6927 - DNA, 25 bp, Homo sapiens
  source 1..25: mol_type = genomic DNA
gttagatgggtgggtgtgtggatgg

SEQ ID NO: 6928 - DNA, 25 bp, Homo sapiens
  source 1..25: mol_type = genomic DNA
ttagatgggtgggtgtgtggatgga

SEQ ID NO: 6929 - DNA, 25 bp, Homo sapiens
  source 1..25: mol_type = genomic DNA
tagatgggtgggtgtgtggatggat

SEQ ID NO: 6930 - DNA, 25 bp, Homo sapiens
  source 1..25: mol_type = genomic DNA
agatgggtgggtgtgtggatggata

SEQ ID NO: 6931 - DNA, 25 bp, Homo sapiens
  source 1..25: mol_type = genomic DNA
gatgggtgggtgtgtggatggataa

SEQ ID NO: 6932 - DNA, 25 bp, Homo sapiens
  source 1..25: mol_type = genomic DNA
atgggtgggtgtgtggatggataaa

SEQ ID NO: 6933 - DNA, 25 bp, Homo sapiens
  source 1..25: mol_type = genomic DNA
tgggtgggtgtgtggatggataaaa

SEQ ID NO: 6934 - DNA, 25 bp, Homo sapiens
  source 1..25: mol_type = genomic DNA
gggtgggtgtgtggatggataaaag

SEQ ID NO: 6935 - DNA, 25 bp, Homo sapiens
  source 1..25: mol_type = genomic DNA
ggtgggtgtgtggatggataaaaga

SEQ ID NO: 6936 - DNA, 25 bp, Homo sapiens
  source 1..25: mol_type = genomic DNA
gtgggtgtgtggatggataaaagag

SEQ ID NO: 6937 - DNA, 25 bp, Homo sapiens
  source 1..25: mol_type = genomic DNA
tgggtgtgtggatggataaaagagt

SEQ ID NO: 6938 - DNA, 25 bp, Homo sapiens
  source 1..25: mol_type = genomic DNA
gggtgtgtggatggataaaagagta

SEQ ID NO: 6939 - DNA, 25 bp, Homo sapiens
  source 1..25: mol_type = genomic DNA
ggtgtgtggatggataaaagagtag

SEQ ID NO: 6940 - DNA, 25 bp, Homo sapiens
  source 1..25: mol_type = genomic DNA
gtgtgtggatggataaaagagtaga

SEQ ID NO: 6941 - DNA, 25 bp, Homo sapiens
  source 1..25: mol_type = genomic DNA
tgtgtggatggataaaagagtagat

SEQ ID NO: 6942 - DNA, 25 bp, Homo sapiens
  source 1..25: mol_type = genomic DNA
gtgtggatggataaaagagtagatg

SEQ ID NO: 6943 - DNA, 25 bp, Homo sapiens
  source 1..25: mol_type = genomic DNA
tgtggatggataaaagagtagatga

SEQ ID NO: 6944 - DNA, 25 bp, Homo sapiens
  source 1..25: mol_type = genomic DNA
gtggatggataaaagagtagatgaa

SEQ ID NO: 6945 - DNA, 25 bp, Homo sapiens
  source 1..25: mol_type = genomic DNA
tggatggataaaagagtagatgaat

SEQ ID NO: 6946 - DNA, 25 bp, Homo sapiens
  source 1..25: mol_type = genomic DNA
ggatggataaaagagtagatgaatg

SEQ ID NO: 6947 - DNA, 25 bp, Homo sapiens
  source 1..25: mol_type = genomic DNA
gatggataaaagagtagatgaatga

SEQ ID NO: 6948 - DNA, 25 bp, Homo sapiens
  source 1..25: mol_type = genomic DNA
atggataaaagagtagatgaatgaa

SEQ ID NO: 6949 - DNA, 25 bp, Homo sapiens
  source 1..25: mol_type = genomic DNA
tggataaaagagtagatgaatgaat

SEQ ID NO: 6950 - DNA, 25 bp, Homo sapiens
  source 1..25: mol_type = genomic DNA
ggataaaagagtagatgaatgaatt

SEQ ID NO: 6951 - DNA, 25 bp, Homo sapiens
  source 1..25: mol_type = genomic DNA
gataaaagagtagatgaatgaatta

SEQ ID NO: 6952 - DNA, 25 bp, Homo sapiens
  source 1..25: mol_type = genomic DNA
ataaaagagtagatgaatgaattaa

SEQ ID NO: 6953 - DNA, 25 bp, Homo sapiens
  source 1..25: mol_type = genomic DNA
taaaagagtagatgaatgaattaat

SEQ ID NO: 6954 - DNA, 25 bp, Homo sapiens
  source 1..25: mol_type = genomic DNA
aaaagagtagatgaatgaattaatg

SEQ ID NO: 6955 - DNA, 25 bp, Homo sapiens
  source 1..25: mol_type = genomic DNA
aaagagtagatgaatgaattaatga

SEQ ID NO: 6956 - DNA, 25 bp, Homo sapiens
  source 1..25: mol_type = genomic DNA
aagagtagatgaatgaattaatgaa

SEQ ID NO: 6957 - DNA, 25 bp, Homo sapiens
  source 1..25: mol_type = genomic DNA
agagtagatgaatgaattaatgaat

SEQ ID NO: 6958 - DNA, 25 bp, Homo sapiens
  source 1..25: mol_type = genomic DNA
gagtagatgaatgaattaatgaata

SEQ ID NO: 6959 - DNA, 25 bp, Homo sapiens
  source 1..25: mol_type = genomic DNA
agtagatgaatgaattaatgaataa

SEQ ID NO: 6960 - DNA, 25 bp, Homo sapiens
  source 1..25: mol_type = genomic DNA
gtagatgaatgaattaatgaataaa

SEQ ID NO: 6961 - DNA, 25 bp, Homo sapiens
  source 1..25: mol_type = genomic DNA
tagatgaatgaattaatgaataaac

SEQ ID NO: 6962 - DNA, 25 bp, Homo sapiens
  source 1..25: mol_type = genomic DNA
agatgaatgaattaatgaataaaca

SEQ ID NO: 6963 - DNA, 25 bp, Homo sapiens
  source 1..25: mol_type = genomic DNA
gatgaatgaattaatgaataaacag

SEQ ID NO: 6964 - DNA, 25 bp, Homo sapiens
  source 1..25: mol_type = genomic DNA
atgaatgaattaatgaataaacagg

SEQ ID NO: 6965 - DNA, 25 bp, Homo sapiens
  source 1..25: mol_type = genomic DNA
tgaatgaattaatgaataaacaggc

SEQ ID NO: 6966 - DNA, 25 bp, Homo sapiens
  source 1..25: mol_type = genomic DNA
gaatgaattaatgaataaacaggca

SEQ ID NO: 6967 - DNA, 25 bp, Homo sapiens
  source 1..25: mol_type = genomic DNA
aatgaattaatgaataaacaggcag

SEQ ID NO: 6968 - DNA, 25 bp, Homo sapiens
  source 1..25: mol_type = genomic DNA
atgaattaatgaataaacaggcaga

SEQ ID NO: 6969 - DNA, 25 bp, Homo sapiens
  source 1..25: mol_type = genomic DNA
tgaattaatgaataaacaggcagat

SEQ ID NO: 6970 - DNA, 25 bp, Homo sapiens
  source 1..25: mol_type = genomic DNA
gaattaatgaataaacaggcagatg

SEQ ID NO: 6971 - DNA, 25 bp, Homo sapiens
  source 1..25: mol_type = genomic DNA
aattaatgaataaacaggcagatgg

SEQ ID NO: 6972 - DNA, 25 bp, Homo sapiens
  source 1..25: mol_type = genomic DNA
attaatgaataaacaggcagatgga

SEQ ID NO: 6973 - DNA, 25 bp, Homo sapiens
  source 1..25: mol_type = genomic DNA
ttaatgaataaacaggcagatggat

SEQ ID NO: 6974 - DNA, 25 bp, Homo sapiens
  source 1..25: mol_type = genomic DNA
taatgaataaacaggcagatggatg

SEQ ID NO: 6975 - DNA, 25 bp, Homo sapiens
  source 1..25: mol_type = genomic DNA
aatgaataaacaggcagatggatga

SEQ ID NO: 6976 - DNA, 25 bp, Homo sapiens
  source 1..25: mol_type = genomic DNA
atgaataaacaggcagatggatgat

SEQ ID NO: 6977 - DNA, 25 bp, Homo sapiens
  source 1..25: mol_type = genomic DNA
tgaataaacaggcagatggatgatg

SEQ ID NO: 6978 - DNA, 25 bp, Homo sapiens
  source 1..25: mol_type = genomic DNA
gaataaacaggcagatggatgatgt

SEQ ID NO: 6979 - DNA, 25 bp, Homo sapiens
  source 1..25: mol_type = genomic DNA
aataaacaggcagatggatgatgta

SEQ ID NO: 6980 - DNA, 25 bp, Homo sapiens
  source 1..25: mol_type = genomic DNA
ataaacaggcagatggatgatgtaa

SEQ ID NO: 6981 - DNA, 25 bp, Homo sapiens
  source 1..25: mol_type = genomic DNA
taaacaggcagatggatgatgtaag

SEQ ID NO: 6982 - DNA, 25 bp, Homo sapiens
  source 1..25: mol_type = genomic DNA
aaacaggcagatggatgatgtaagc

SEQ ID NO: 6983 - DNA, 25 bp, Homo sapiens
  source 1..25: mol_type = genomic DNA
aacaggcagatggatgatgtaagct

SEQ ID NO: 6984 - DNA, 25 bp, Homo sapiens
  source 1..25: mol_type = genomic DNA
acaggcagatggatgatgtaagctg

SEQ ID NO: 6985 - DNA, 25 bp, Homo sapiens
  source 1..25: mol_type = genomic DNA
caggcagatggatgatgtaagctgc

SEQ ID NO: 6986 - DNA, 25 bp, Homo sapiens
  source 1..25: mol_type = genomic DNA
aggcagatggatgatgtaagctgcc

SEQ ID NO: 6987 - DNA, 25 bp, Homo sapiens
  source 1..25: mol_type = genomic DNA
ggcagatggatgatgtaagctgccc

SEQ ID NO: 6988 - DNA, 25 bp, Homo sapiens
  source 1..25: mol_type = genomic DNA
gcagatggatgatgtaagctgcccc

SEQ ID NO: 6989 - DNA, 25 bp, Homo sapiens
  source 1..25: mol_type = genomic DNA
cagatggatgatgtaagctgcccca

SEQ ID NO: 6990 - DNA, 25 bp, Homo sapiens
  source 1..25: mol_type = genomic DNA
agatggatgatgtaagctgccccag

SEQ ID NO: 6991 - DNA, 25 bp, Homo sapiens
  source 1..25: mol_type = genomic DNA
gatggatgatgtaagctgccccaga

SEQ ID NO: 6992 - DNA, 25 bp, Homo sapiens
  source 1..25: mol_type = genomic DNA
atggatgatgtaagctgccccagac

SEQ ID NO: 6993 - DNA, 25 bp, Homo sapiens
  source 1..25: mol_type = genomic DNA
tggatgatgtaagctgccccagacc

SEQ ID NO: 6994 - DNA, 25 bp, Homo sapiens
  source 1..25: mol_type = genomic DNA
ggatgatgtaagctgccccagaccc

SEQ ID NO: 6995 - DNA, 25 bp, Homo sapiens
  source 1..25: mol_type = genomic DNA
gatgatgtaagctgccccagaccct

SEQ ID NO: 6996 - DNA, 25 bp, Homo sapiens
  source 1..25: mol_type = genomic DNA
atgatgtaagctgccccagaccctg

SEQ ID NO: 6997 - DNA, 25 bp, Homo sapiens
  source 1..25: mol_type = genomic DNA
tgatgtaagctgccccagaccctgg

SEQ ID NO: 6998 - DNA, 25 bp, Homo sapiens
  source 1..25: mol_type = genomic DNA
gatgtaagctgccccagaccctggg

SEQ ID NO: 6999 - DNA, 25 bp, Homo sapiens
  source 1..25: mol_type = genomic DNA
atgtaagctgccccagaccctggga

SEQ ID NO: 7000 - DNA, 25 bp, Homo sapiens
  source 1..25: mol_type = genomic DNA
tgtaagctgccccagaccctgggac

SEQ ID NO: 7001 - DNA, 25 bp, Homo sapiens
  source 1..25: mol_type = genomic DNA
gtaagctgccccagaccctgggacc

SEQ ID NO: 7002 - DNA, 25 bp, Homo sapiens
  source 1..25: mol_type = genomic DNA
taagctgccccagaccctgggacct

SEQ ID NO: 7003 - DNA, 25 bp, Homo sapiens
  source 1..25: mol_type = genomic DNA
aagctgccccagaccctgggacctc

SEQ ID NO: 7004 - DNA, 25 bp, Homo sapiens
  source 1..25: mol_type = genomic DNA
agctgccccagaccctgggacctct

SEQ ID NO: 7005 - DNA, 25 bp, Homo sapiens
  source 1..25: mol_type = genomic DNA
gctgccccagaccctgggacctctg

SEQ ID NO: 7006 - DNA, 25 bp, Homo sapiens
  source 1..25: mol_type = genomic DNA
ctgccccagaccctgggacctctga

SEQ ID NO: 7007 - DNA, 25 bp, Homo sapiens
  source 1..25: mol_type = genomic DNA
tgccccagaccctgggacctctgac

SEQ ID NO: 7008 - DNA, 25 bp, Homo sapiens
  source 1..25: mol_type = genomic DNA
gccccagaccctgggacctctgacc

SEQ ID NO: 7009 - DNA, 25 bp, Homo sapiens
  source 1..25: mol_type = genomic DNA
ccccagaccctgggacctctgaccc

SEQ ID NO: 7010 - DNA, 25 bp, Homo sapiens
  source 1..25: mol_type = genomic DNA
cccagaccctgggacctctgacccc

SEQ ID NO: 7011 - DNA, 25 bp, Homo sapiens
  source 1..25: mol_type = genomic DNA
ccagaccctgggacctctgaccccc

SEQ ID NO: 7012 - DNA, 25 bp, Homo sapiens
  source 1..25: mol_type = genomic DNA
cagaccctgggacctctgacccccg

SEQ ID NO: 7013 - DNA, 25 bp, Homo sapiens
  source 1..25: mol_type = genomic DNA
agaccctgggacctctgacccccgg

SEQ ID NO: 7014 - DNA, 25 bp, Homo sapiens
  source 1..25: mol_type = genomic DNA
gaccctgggacctctgacccccggc

SEQ ID NO: 7015 - DNA, 25 bp, Homo sapiens
  source 1..25: mol_type = genomic DNA
accctgggacctctgacccccggcg

SEQ ID NO: 7016 - DNA, 25 bp, Homo sapiens
  source 1..25: mol_type = genomic DNA
ccctgggacctctgacccccggcga

SEQ ID NO: 7017 - DNA, 25 bp, Homo sapiens
  source 1..25: mol_type = genomic DNA
cctgggacctctgacccccggcgac

SEQ ID NO: 7018 - DNA, 25 bp, Homo sapiens
  source 1..25: mol_type = genomic DNA
ctgggacctctgacccccggcgacc

SEQ ID NO: 7019 - DNA, 25 bp, Homo sapiens
  source 1..25: mol_type = genomic DNA
tgggacctctgacccccggcgaccc

SEQ ID NO: 7020 - DNA, 25 bp, Homo sapiens
  source 1..25: mol_type = genomic DNA
gggacctctgacccccggcgacccc

SEQ ID NO: 7021 - DNA, 25 bp, Homo sapiens
  source 1..25: mol_type = genomic DNA
ggacctctgacccccggcgacccct

SEQ ID NO: 7022 - DNA, 25 bp, Homo sapiens
  source 1..25: mol_type = genomic DNA
gacctctgacccccggcgacccctt

SEQ ID NO: 7023 - DNA, 25 bp, Homo sapiens
  source 1..25: mol_type = genomic DNA
acctctgacccccggcgaccccttg

SEQ ID NO: 7024 - DNA, 25 bp, Homo sapiens
  source 1..25: mol_type = genomic DNA
cctctgacccccggcgaccccttgc

SEQ ID NO: 7025 - DNA, 25 bp, Homo sapiens
  source 1..25: mol_type = genomic DNA
ctctgacccccggcgaccccttgca

SEQ ID NO: 7026 - DNA, 25 bp, Homo sapiens
  source 1..25: mol_type = genomic DNA
tctgacccccggcgaccccttgcac

SEQ ID NO: 7027 - DNA, 25 bp, Homo sapiens
  source 1..25: mol_type = genomic DNA
ctgacccccggcgaccccttgcact

SEQ ID NO: 7028 - DNA, 25 bp, Homo sapiens
  source 1..25: mol_type = genomic DNA
tgacccccggcgaccccttgcactc

SEQ ID NO: 7029 - DNA, 25 bp, Homo sapiens
  source 1..25: mol_type = genomic DNA
gacccccggcgaccccttgcactct

SEQ ID NO: 7030 - DNA, 25 bp, Homo sapiens
  source 1..25: mol_type = genomic DNA
acccccggcgaccccttgcactctc

SEQ ID NO: 7031 - DNA, 25 bp, Homo sapiens
  source 1..25: mol_type = genomic DNA
cccccggcgaccccttgcactctcc

SEQ ID NO: 7032 - DNA, 25 bp, Homo sapiens
  source 1..25: mol_type = genomic DNA
ccccggcgaccccttgcactctcca

SEQ ID NO: 7033 - DNA, 25 bp, Homo sapiens
  source 1..25: mol_type = genomic DNA
cccggcgaccccttgcactctccat

SEQ ID NO: 7034 - DNA, 25 bp, Homo sapiens
  source 1..25: mol_type = genomic DNA
ccggcgaccccttgcactctccatg

SEQ ID NO: 7035 - DNA, 25 bp, Homo sapiens
  source 1..25: mol_type = genomic DNA
cggcgaccccttgcactctccatga

SEQ ID NO: 7036 - DNA, 25 bp, Homo sapiens
  source 1..25: mol_type = genomic DNA
ggcgaccccttgcactctccatgac

SEQ ID NO: 7037 - DNA, 25 bp, Homo sapiens
  source 1..25: mol_type = genomic DNA
gcgaccccttgcactctccatgaca

SEQ ID NO: 7038 - DNA, 25 bp, Homo sapiens
  source 1..25: mol_type = genomic DNA
cgaccccttgcactctccatgacac

SEQ ID NO: 7039 - DNA, 25 bp, Homo sapiens
  source 1..25: mol_type = genomic DNA
gaccccttgcactctccatgacact

SEQ ID NO: 7040 - DNA, 25 bp, Homo sapiens
  source 1..25: mol_type = genomic DNA
accccttgcactctccatgacactt

SEQ ID NO: 7041 - DNA, 25 bp, Homo sapiens
  source 1..25: mol_type = genomic DNA
ccccttgcactctccatgacacttt

SEQ ID NO: 7042 - DNA, 25 bp, Homo sapiens
  source 1..25: mol_type = genomic DNA
cccttgcactctccatgacactttc

SEQ ID NO: 7043 - DNA, 25 bp, Homo sapiens
  source 1..25: mol_type = genomic DNA
ccttgcactctccatgacactttct

SEQ ID NO: 7044 - DNA, 25 bp, Homo sapiens
  source 1..25: mol_type = genomic DNA
cttgcactctccatgacactttctc

SEQ ID NO: 7045 - DNA, 25 bp, Homo sapiens
  source 1..25: mol_type = genomic DNA
ttgcactctccatgacactttctct

SEQ ID NO: 7046 - DNA, 25 bp, Homo sapiens
  source 1..25: mol_type = genomic DNA
tgcactctccatgacactttctctc

SEQ ID NO: 7047 - DNA, 25 bp, Homo sapiens
  source 1..25: mol_type = genomic DNA
gcactctccatgacactttctctcc

SEQ ID NO: 7048 - DNA, 25 bp, Homo sapiens
  source 1..25: mol_type = genomic DNA
cactctccatgacactttctctccc

SEQ ID NO: 7049 - DNA, 25 bp, Homo sapiens
  source 1..25: mol_type = genomic DNA
actctccatgacactttctctccca

SEQ ID NO: 7050 - DNA, 25 bp, Homo sapiens
  source 1..25: mol_type = genomic DNA
ctctccatgacactttctctcccat

SEQ ID NO: 7051 - DNA, 25 bp, Homo sapiens
  source 1..25: mol_type = genomic DNA
tctccatgacactttctctcccatg

SEQ ID NO: 7052 - DNA, 25 bp, Homo sapiens
  source 1..25: mol_type = genomic DNA
ctccatgacactttctctcccatgg

SEQ ID NO: 7053 - DNA, 25 bp, Homo sapiens
  source 1..25: mol_type = genomic DNA
tccatgacactttctctcccatggt

SEQ ID NO: 7054 - DNA, 25 bp, Homo sapiens
  source 1..25: mol_type = genomic DNA
ccatgacactttctctcccatggtg

SEQ ID NO: 7055 - DNA, 25 bp, Homo sapiens
  source 1..25: mol_type = genomic DNA
catgacactttctctcccatggtgg

SEQ ID NO: 7056 - DNA, 25 bp, Homo sapiens
  source 1..25: mol_type = genomic DNA
atgacactttctctcccatggtggc

SEQ ID NO: 7057 - DNA, 25 bp, Homo sapiens
  source 1..25: mol_type = genomic DNA
tgacactttctctcccatggtggca

SEQ ID NO: 7058 - DNA, 25 bp, Homo sapiens
  source 1..25: mol_type = genomic DNA
gacactttctctcccatggtggcag

SEQ ID NO: 7059 - DNA, 23 bp, synthetic construct
  source 1..23: mol_type = other DNA
ggaggggccgagcaatgaccctc

SEQ ID NO: 7060 - DNA, 23 bp, synthetic construct
  source 1..23: mol_type = other DNA
gggaggggccgagcaatgaccct

SEQ ID NO: 7061 - DNA, 23 bp, synthetic construct
  source 1..23: mol_type = other DNA
tgggaggggccgagcaatgaccc

SEQ ID NO: 7062 - DNA, 23 bp, synthetic construct
  source 1..23: mol_type = other DNA
atgggaggggccgagcaatgacc

SEQ ID NO: 7063 - DNA, 23 bp, synthetic construct
  source 1..23: mol_type = other DNA
catgggaggggccgagcaatgac

SEQ ID NO: 7064 - DNA, 23 bp, synthetic construct
  source 1..23: mol_type = other DNA
gcatgggaggggccgagcaatga

SEQ ID NO: 7065 - DNA, 23 bp, synthetic construct
  source 1..23: mol_type = other DNA
ggcatgggaggggccgagcaatg

SEQ ID NO: 7066 - DNA, 23 bp, synthetic construct
  source 1..23: mol_type = other DNA
tggcatgggaggggccgagcaat

SEQ ID NO: 7067 - DNA, 23 bp, synthetic construct
  source 1..23: mol_type = other DNA
gtggcatgggaggggccgagcaa

SEQ ID NO: 7068 - DNA, 23 bp, synthetic construct
  source 1..23: mol_type = other DNA
agtggcatgggaggggccgagca

SEQ ID NO: 7069 - DNA, 23 bp, synthetic construct
  source 1..23: mol_type = other DNA
aagtggcatgggaggggccgagc

SEQ ID NO: 7070 - DNA, 23 bp, synthetic construct
  source 1..23: mol_type = other DNA
gaagtggcatgggaggggccgag

SEQ ID NO: 7071 - DNA, 23 bp, synthetic construct
  source 1..23: mol_type = other DNA
ggaagtggcatgggaggggccga

SEQ ID NO: 7072 - DNA, 23 bp, synthetic construct
  source 1..23: mol_type = other DNA
tggaagtggcatgggaggggccg

SEQ ID NO: 7073 - DNA, 23 bp, synthetic construct
  source 1..23: mol_type = other DNA
gtggaagtggcatgggaggggcc

SEQ ID NO: 7074 - DNA, 23 bp, synthetic construct
  source 1..23: mol_type = other DNA
agtggaagtggcatgggaggggc

SEQ ID NO: 7075 - DNA, 23 bp, synthetic construct
  source 1..23: mol_type = other DNA
gagtggaagtggcatgggagggg

SEQ ID NO: 7076 - DNA, 23 bp, synthetic construct
  source 1..23: mol_type = other DNA
tgagtggaagtggcatgggaggg

SEQ ID NO: 7077 - DNA, 23 bp, synthetic construct
  source 1..23: mol_type = other DNA
gtgagtggaagtggcatgggagg

SEQ ID NO: 7078 - DNA, 23 bp, synthetic construct
  source 1..23: mol_type = other DNA
ggtgagtggaagtggcatgggag

SEQ ID NO: 7079 - DNA, 23 bp, synthetic construct
  source 1..23: mol_type = other DNA
tggtgagtggaagtggcatggga

SEQ ID NO: 7080 - DNA, 23 bp, synthetic construct
  source 1..23: mol_type = other DNA
atggtgagtggaagtggcatggg

SEQ ID NO: 7081 - DNA, 23 bp, synthetic construct
  source 1..23: mol_type = other DNA
aatggtgagtggaagtggcatgg

SEQ ID NO: 7082 - DNA, 23 bp, synthetic construct
  source 1..23: mol_type = other DNA
gaatggtgagtggaagtggcatg

SEQ ID NO: 7083 - DNA, 23 bp, synthetic construct
  source 1..23: mol_type = other DNA
ggaatggtgagtggaagtggcat

SEQ ID NO: 7084 - DNA, 23 bp, synthetic construct
  source 1..23: mol_type = other DNA
aggaatggtgagtggaagtggca

SEQ ID NO: 7085 - DNA, 23 bp, synthetic construct
  source 1..23: mol_type = other DNA
caggaatggtgagtggaagtggc

SEQ ID NO: 7086 - DNA, 23 bp, synthetic construct
  source 1..23: mol_type = other DNA
gcaggaatggtgagtggaagtgg

SEQ ID NO: 7087 - DNA, 23 bp, synthetic construct
  source 1..23: mol_type = other DNA
ggcaggaatggtgagtggaagtg

SEQ ID NO: 7088 - DNA, 23 bp, synthetic construct
  source 1..23: mol_type = other DNA
aggcaggaatggtgagtggaagt

SEQ ID NO: 7089 - DNA, 23 bp, synthetic construct
  source 1..23: mol_type = other DNA
caggcaggaatggtgagtggaag

SEQ ID NO: 7090 - DNA, 23 bp, synthetic construct
  source 1..23: mol_type = other DNA
gcaggcaggaatggtgagtggaa

SEQ ID NO: 7091 - DNA, 23 bp, synthetic construct
  source 1..23: mol_type = other DNA
ggcaggcaggaatggtgagtgga

SEQ ID NO: 7092 - DNA, 23 bp, synthetic construct
  source 1..23: mol_type = other DNA
gggcaggcaggaatggtgagtgg

SEQ ID NO: 7093 - DNA, 23 bp, synthetic construct
  source 1..23: mol_type = other DNA
tgggcaggcaggaatggtgagtg

SEQ ID NO: 7094 - DNA, 23 bp, synthetic construct
  source 1..23: mol_type = other DNA
ctgggcaggcaggaatggtgagt

SEQ ID NO: 7095 - DNA, 23 bp, synthetic construct
  source 1..23: mol_type = other DNA
gctgggcaggcaggaatggtgag

SEQ ID NO: 7096 - DNA, 23 bp, synthetic construct
  source 1..23: mol_type = other DNA
agctgggcaggcaggaatggtga

SEQ ID NO: 7097 - DNA, 23 bp, synthetic construct
  source 1..23: mol_type = other DNA
gagctgggcaggcaggaatggtg

SEQ ID NO: 7098 - DNA, 23 bp, synthetic construct
  source 1..23: mol_type = other DNA
agagctgggcaggcaggaatggt

SEQ ID NO: 7099 - DNA, 23 bp, synthetic construct
  source 1..23: mol_type = other DNA
aagagctgggcaggcaggaatgg

SEQ ID NO: 7100 - DNA, 23 bp, synthetic construct
  source 1..23: mol_type = other DNA
gaagagctgggcaggcaggaatg

SEQ ID NO: 7101 - DNA, 23 bp, synthetic construct
  source 1..23: mol_type = other DNA
ggaagagctgggcaggcaggaat

SEQ ID NO: 7102 - DNA, 23 bp, synthetic construct
  source 1..23: mol_type = other DNA
aggaagagctgggcaggcaggaa

SEQ ID NO: 7103 - DNA, 23 bp, synthetic construct
  source 1..23: mol_type = other DNA
gaggaagagctgggcaggcagga

SEQ ID NO: 7104 - DNA, 23 bp, synthetic construct
  source 1..23: mol_type = other DNA
agaggaagagctgggcaggcagg

SEQ ID NO: 7105 - DNA, 23 bp, synthetic construct
  source 1..23: mol_type = other DNA
aagaggaagagctgggcaggcag

SEQ ID NO: 7106 - DNA, 23 bp, synthetic construct
  source 1..23: mol_type = other DNA
aaagaggaagagctgggcaggca

SEQ ID NO: 7107 - DNA, 23 bp, synthetic construct
  source 1..23: mol_type = other DNA
gaaagaggaagagctgggcaggc

SEQ ID NO: 7108 - DNA, 23 bp, synthetic construct
  source 1..23: mol_type = other DNA
agaaagaggaagagctgggcagg

SEQ ID NO: 7109 - DNA, 23 bp, synthetic construct
  source 1..23: mol_type = other DNA
cagaaagaggaagagctgggcag

SEQ ID NO: 7110 - DNA, 23 bp, synthetic construct
  source 1..23: mol_type = other DNA
ccagaaagaggaagagctgggca

SEQ ID NO: 7111 - DNA, 23 bp, synthetic construct
  source 1..23: mol_type = other DNA
gccagaaagaggaagagctgggc

SEQ ID NO: 7112 - DNA, 23 bp, synthetic construct
  source 1..23: mol_type = other DNA
ggccagaaagaggaagagctggg

SEQ ID NO: 7113 - DNA, 23 bp, synthetic construct
  source 1..23: mol_type = other DNA
tggccagaaagaggaagagctgg

SEQ ID NO: 7114 - DNA, 23 bp, synthetic construct
  source 1..23: mol_type = other DNA
gtggccagaaagaggaagagctg

SEQ ID NO: 7115 - DNA, 23 bp, synthetic construct
  source 1..23: mol_type = other DNA
tgtggccagaaagaggaagagct

SEQ ID NO: 7116 - DNA, 23 bp, synthetic construct
  source 1..23: mol_type = other DNA
gtgtggccagaaagaggaagagc

SEQ ID NO: 7117 - DNA, 23 bp, synthetic construct
  source 1..23: mol_type = other DNA
ggtgtggccagaaagaggaagag

SEQ ID NO: 7118 - DNA, 23 bp, synthetic construct
  source 1..23: mol_type = other DNA
tggtgtggccagaaagaggaaga

SEQ ID NO: 7119 - DNA, 23 bp, synthetic construct
  source 1..23: mol_type = other DNA
atggtgtggccagaaagaggaag

SEQ ID NO: 7120 - DNA, 23 bp, synthetic construct
  source 1..23: mol_type = other DNA
gatggtgtggccagaaagaggaa

SEQ ID NO: 7121 - DNA, 23 bp, synthetic construct
  source 1..23: mol_type = other DNA
ggatggtgtggccagaaagagga

SEQ ID NO: 7122 - DNA, 23 bp, synthetic construct
  source 1..23: mol_type = other DNA
tggatggtgtggccagaaagagg

SEQ ID NO: 7123 - DNA, 23 bp, synthetic construct
  source 1..23: mol_type = other DNA
gtggatggtgtggccagaaagag

SEQ ID NO: 7124 - DNA, 23 bp, synthetic construct
  source 1..23: mol_type = other DNA
tgtggatggtgtggccagaaaga

SEQ ID NO: 7125 - DNA, 23 bp, synthetic construct
  source 1..23: mol_type = other DNA
gtgtggatggtgtggccagaaag

SEQ ID NO: 7126 - DNA, 23 bp, synthetic construct
  source 1..23: mol_type = other DNA
agtgtggatggtgtggccagaaa

SEQ ID NO: 7127 - DNA, 23 bp, synthetic construct
  source 1..23: mol_type = other DNA
gagtgtggatggtgtggccagaa

SEQ ID NO: 7128 - DNA, 23 bp, synthetic construct
  source 1..23: mol_type = other DNA
agagtgtggatggtgtggccaga

SEQ ID NO: 7129 - DNA, 23 bp, synthetic construct
  source 1..23: mol_type = other DNA
gagagtgtggatggtgtggccag

SEQ ID NO: 7130 - DNA, 23 bp, synthetic construct
  source 1..23: mol_type = other DNA
ggagagtgtggatggtgtggcca

SEQ ID NO: 7131 - DNA, 23 bp, synthetic construct
  source 1..23: mol_type = other DNA
aggagagtgtggatggtgtggcc

SEQ ID NO: 7132 - DNA, 23 bp, synthetic construct
  source 1..23: mol_type = other DNA
caggagagtgtggatggtgtggc

SEQ ID NO: 7133 - DNA, 23 bp, synthetic construct
  source 1..23: mol_type = other DNA
ccaggagagtgtggatggtgtgg

SEQ ID NO: 7134 - DNA, 23 bp, synthetic construct
  source 1..23: mol_type = other DNA
gccaggagagtgtggatggtgtg

SEQ ID NO: 7135 - DNA, 23 bp, synthetic construct
  source 1..23: mol_type = other DNA
ggccaggagagtgtggatggtgt

SEQ ID NO: 7136 - DNA, 23 bp, synthetic construct
  source 1..23: mol_type = other DNA
gggccaggagagtgtggatggtg

SEQ ID NO: 7137 - DNA, 23 bp, synthetic construct
  source 1..23: mol_type = other DNA
agggccaggagagtgtggatggt

SEQ ID NO: 7138 - DNA, 23 bp, synthetic construct
  source 1..23: mol_type = other DNA
gagggccaggagagtgtggatgg

SEQ ID NO: 7139 - DNA, 23 bp, synthetic construct
  source 1..23: mol_type = other DNA
agagggccaggagagtgtggatg

SEQ ID NO: 7140 - DNA, 23 bp, synthetic construct
  source 1..23: mol_type = other DNA
cagagggccaggagagtgtggat

SEQ ID NO: 7141 - DNA, 23 bp, synthetic construct
  source 1..23: mol_type = other DNA
tcagagggccaggagagtgtgga

SEQ ID NO: 7142 - DNA, 23 bp, synthetic construct
  source 1..23: mol_type = other DNA
ctcagagggccaggagagtgtgg

SEQ ID NO: 7143 - DNA, 23 bp, synthetic construct
  source 1..23: mol_type = other DNA
tctcagagggccaggagagtgtg

SEQ ID NO: 7144 - DNA, 23 bp, synthetic construct
  source 1..23: mol_type = other DNA
gtctcagagggccaggagagtgt

SEQ ID NO: 7145 - DNA, 23 bp, synthetic construct
  source 1..23: mol_type = other DNA
agtctcagagggccaggagagtg

SEQ ID NO: 7146 - DNA, 23 bp, synthetic construct
  source 1..23: mol_type = other DNA
cagtctcagagggccaggagagt

SEQ ID NO: 7147 - DNA, 23 bp, synthetic construct
  source 1..23: mol_type = other DNA
gcagtctcagagggccaggagag

SEQ ID NO: 7148 - DNA, 23 bp, synthetic construct
  source 1..23: mol_type = other DNA
ggcagtctcagagggccaggaga

SEQ ID NO: 7149 - DNA, 23 bp, synthetic construct
  source 1..23: mol_type = other DNA
gggcagtctcagagggccaggag

SEQ ID NO: 7150 - DNA, 23 bp, synthetic construct
  source 1..23: mol_type = other DNA
cgggcagtctcagagggccagga

SEQ ID NO: 7151 - DNA, 23 bp, synthetic construct
  source 1..23: mol_type = other DNA
gcgggcagtctcagagggccagg

SEQ ID NO: 7152 - DNA, 23 bp, synthetic construct
  source 1..23: mol_type = other DNA
ggcgggcagtctcagagggccag

SEQ ID NO: 7153 - DNA, 23 bp, synthetic construct
  source 1..23: mol_type = other DNA
tggcgggcagtctcagagggcca

SEQ ID NO: 7154 - DNA, 23 bp, synthetic construct
  source 1..23: mol_type = other DNA
atggcgggcagtctcagagggcc

SEQ ID NO: 7155 - DNA, 23 bp, synthetic construct
  source 1..23: mol_type = other DNA
catggcgggcagtctcagagggc

SEQ ID NO: 7156 - DNA, 23 bp, synthetic construct
  source 1..23: mol_type = other DNA
gcatggcgggcagtctcagaggg

SEQ ID NO: 7157 - DNA, 23 bp, synthetic construct
  source 1..23: mol_type = other DNA
ggcatggcgggcagtctcagagg

SEQ ID NO: 7158 - DNA, 23 bp, synthetic construct
  source 1..23: mol_type = other DNA
tggcatggcgggcagtctcagag

SEQ ID NO: 7159 - DNA, 23 bp, synthetic construct
  source 1..23: mol_type = other DNA
atggcatggcgggcagtctcaga

SEQ ID NO: 7160 - DNA, 23 bp, synthetic construct
  source 1..23: mol_type = other DNA
aatggcatggcgggcagtctcag

SEQ ID NO: 7161 - DNA, 23 bp, synthetic construct
  source 1..23: mol_type = other DNA
gaatggcatggcgggcagtctca

SEQ ID NO: 7162 - DNA, 23 bp, synthetic construct
  source 1..23: mol_type = other DNA
ggaatggcatggcgggcagtctc

SEQ ID NO: 7163 - DNA, 23 bp, synthetic construct
  source 1..23: mol_type = other DNA
gggaatggcatggcgggcagtct

SEQ ID NO: 7164 - DNA, 23 bp, synthetic construct
  source 1..23: mol_type = other DNA
agggaatggcatggcgggcagtc

SEQ ID NO: 7165 - DNA, 23 bp, synthetic construct
  source 1..23: mol_type = other DNA
aagggaatggcatggcgggcagt

SEQ ID NO: 7166 - DNA, 23 bp, synthetic construct
  source 1..23: mol_type = other DNA
aaagggaatggcatggcgggcag

SEQ ID NO: 7167 - DNA, 23 bp, synthetic construct
  source 1..23: mol_type = other DNA
taaagggaatggcatggcgggca

SEQ ID NO: 7168 - DNA, 23 bp, synthetic construct
  source 1..23: mol_type = other DNA
gtaaagggaatggcatggcgggc

SEQ ID NO: 7169 - DNA, 23 bp, synthetic construct
  source 1..23: mol_type = other DNA
ggtaaagggaatggcatggcggg

SEQ ID NO: 7170 - DNA, 23 bp, synthetic construct
  source 1..23: mol_type = other DNA
aggtaaagggaatggcatggcgg

SEQ ID NO: 7171 - DNA, 23 bp, synthetic construct
  source 1..23: mol_type = other DNA
caggtaaagggaatggcatggcg

SEQ ID NO: 7172 - DNA, 23 bp, synthetic construct
  source 1..23: mol_type = other DNA
ccaggtaaagggaatggcatggc

SEQ ID NO: 7173 - DNA, 23 bp, synthetic construct
  source 1..23: mol_type = other DNA
tccaggtaaagggaatggcatgg

SEQ ID NO: 7174 - DNA, 23 bp, synthetic construct
  source 1..23: mol_type = other DNA
ttccaggtaaagggaatggcatg

SEQ ID NO: 7175 - DNA, 23 bp, synthetic construct
  source 1..23: mol_type = other DNA
tttccaggtaaagggaatggcat

SEQ ID NO: 7176 - DNA, 23 bp, synthetic construct
  source 1..23: mol_type = other DNA
ttttccaggtaaagggaatggca

SEQ ID NO: 7177 - DNA, 23 bp, synthetic construct
  source 1..23: mol_type = other DNA
gttttccaggtaaagggaatggc

SEQ ID NO: 7178 - DNA, 23 bp, synthetic construct
  source 1..23: mol_type = other DNA
agttttccaggtaaagggaatgg

SEQ ID NO: 7179 - DNA, 23 bp, synthetic construct
  source 1..23: mol_type = other DNA
gagttttccaggtaaagggaatg

SEQ ID NO: 7180 - DNA, 23 bp, synthetic construct
  source 1..23: mol_type = other DNA
ggagttttccaggtaaagggaat

SEQ ID NO: 7181 - DNA, 23 bp, synthetic construct
  source 1..23: mol_type = other DNA
aggagttttccaggtaaagggaa

SEQ ID NO: 7182 - DNA, 23 bp, synthetic construct
  source 1..23: mol_type = other DNA
gaggagttttccaggtaaaggga

SEQ ID NO: 7183 - DNA, 23 bp, synthetic construct
  source 1..23: mol_type = other DNA
ggaggagttttccaggtaaaggg

SEQ ID NO: 7184 - DNA, 23 bp, synthetic construct
  source 1..23: mol_type = other DNA
gggaggagttttccaggtaaagg

SEQ ID NO: 7185 - DNA, 23 bp, synthetic construct
  source 1..23: mol_type = other DNA
agggaggagttttccaggtaaag

SEQ ID NO: 7186 - DNA, 23 bp, synthetic construct
  source 1..23: mol_type = other DNA
tagggaggagttttccaggtaaa

SEQ ID NO: 7187 - DNA, 23 bp, synthetic construct
  source 1..23: mol_type = other DNA
atagggaggagttttccaggtaa

SEQ ID NO: 7188 - DNA, 23 bp, synthetic construct
  source 1..23: mol_type = other DNA
gatagggaggagttttccaggta

SEQ ID NO: 7189 - DNA, 23 bp, synthetic construct
  source 1..23: mol_type = other DNA
ggatagggaggagttttccaggt

SEQ ID NO: 7190 - DNA, 23 bp, synthetic construct
  source 1..23: mol_type = other DNA
tggatagggaggagttttccagg

SEQ ID NO: 7191 - DNA, 23 bp, synthetic construct
  source 1..23: mol_type = other DNA
atggatagggaggagttttccag

SEQ ID NO: 7192 - DNA, 23 bp, synthetic construct
  source 1..23: mol_type = other DNA
gatggatagggaggagttttcca

SEQ ID NO: 7193 - DNA, 23 bp, synthetic construct
  source 1..23: mol_type = other DNA
tgatggatagggaggagttttcc

SEQ ID NO: 7194 - DNA, 23 bp, synthetic construct
  source 1..23: mol_type = other DNA
ttgatggatagggaggagttttc

SEQ ID NO: 7195 - DNA, 23 bp, synthetic construct
  source 1..23: mol_type = other DNA
tttgatggatagggaggagtttt

SEQ ID NO: 7196 - DNA, 23 bp, synthetic construct
  source 1..23: mol_type = other DNA
ctttgatggatagggaggagttt

SEQ ID NO: 7197 - DNA, 23 bp, synthetic construct
  source 1..23: mol_type = other DNA
actttgatggatagggaggagtt

SEQ ID NO: 7198 - DNA, 23 bp, synthetic construct
  source 1..23: mol_type = other DNA
gactttgatggatagggaggagt

SEQ ID NO: 7199 - DNA, 23 bp, synthetic construct
  source 1..23: mol_type = other DNA
ggactttgatggatagggaggag

SEQ ID NO: 7200 - DNA, 23 bp, synthetic construct
  source 1..23: mol_type = other DNA
tggactttgatggatagggagga

SEQ ID NO: 7201 - DNA, 23 bp, synthetic construct
  source 1..23: mol_type = other DNA
ctggactttgatggatagggagg

SEQ ID NO: 7202 - DNA, 23 bp, synthetic construct
  source 1..23: mol_type = other DNA
tctggactttgatggatagggag

SEQ ID NO: 7203 - DNA, 23 bp, synthetic construct
  source 1..23: mol_type = other DNA
atctggactttgatggataggga

SEQ ID NO: 7204 - DNA, 23 bp, synthetic construct
  source 1..23: mol_type = other DNA
aatctggactttgatggataggg

SEQ ID NO: 7205 - DNA, 23 bp, synthetic construct
  source 1..23: mol_type = other DNA
gaatctggactttgatggatagg

SEQ ID NO: 7206 - DNA, 23 bp, synthetic construct
  source 1..23: mol_type = other DNA
tgaatctggactttgatggatag

SEQ ID NO: 7207 - DNA, 23 bp, synthetic construct
  source 1..23: mol_type = other DNA
ctgaatctggactttgatggata

SEQ ID NO: 7208 - DNA, 23 bp, synthetic construct
  source 1..23: mol_type = other DNA
cctgaatctggactttgatggat

SEQ ID NO: 7209 - DNA, 23 bp, synthetic construct
  source 1..23: mol_type = other DNA
ccctgaatctggactttgatgga

SEQ ID NO: 7210 - DNA, 23 bp, synthetic construct
  source 1..23: mol_type = other DNA
accctgaatctggactttgatgg

SEQ ID NO: 7211 - DNA, 23 bp, synthetic construct
  source 1..23: mol_type = other DNA
gaccctgaatctggactttgatg

SEQ ID NO: 7212 - DNA, 23 bp, synthetic construct
  source 1..23: mol_type = other DNA
tgaccctgaatctggactttgat

SEQ ID NO: 7213 - DNA, 23 bp, synthetic construct
  source 1..23: mol_type = other DNA
gtgaccctgaatctggactttga

SEQ ID NO: 7214 - DNA, 23 bp, synthetic construct
  source 1..23: mol_type = other DNA
ggtgaccctgaatctggactttg

SEQ ID NO: 7215 - DNA, 23 bp, synthetic construct
  source 1..23: mol_type = other DNA
aggtgaccctgaatctggacttt

SEQ ID NO: 7216 - DNA, 23 bp, synthetic construct
  source 1..23: mol_type = other DNA
gaggtgaccctgaatctggactt

SEQ ID NO: 7217 - DNA, 23 bp, synthetic construct
  source 1..23: mol_type = other DNA
ggaggtgaccctgaatctggact

SEQ ID NO: 7218 - DNA, 23 bp, synthetic construct
  source 1..23: mol_type = other DNA
aggaggtgaccctgaatctggac

SEQ ID NO: 7219 - DNA, 23 bp, synthetic construct
  source 1..23: mol_type = other DNA
gaggaggtgaccctgaatctgga

SEQ ID NO: 7220 - DNA, 23 bp, synthetic construct
  source 1..23: mol_type = other DNA
agaggaggtgaccctgaatctgg

SEQ ID NO: 7221 - DNA, 23 bp, synthetic construct
  source 1..23: mol_type = other DNA
cagaggaggtgaccctgaatctg

SEQ ID NO: 7222 - DNA, 23 bp, synthetic construct
  source 1..23: mol_type = other DNA
ccagaggaggtgaccctgaatct

SEQ ID NO: 7223 - DNA, 23 bp, synthetic construct
  source 1..23: mol_type = other DNA
cccagaggaggtgaccctgaatc

SEQ ID NO: 7224 - DNA, 23 bp, synthetic construct
  source 1..23: mol_type = other DNA
tcccagaggaggtgaccctgaat

SEQ ID NO: 7225 - DNA, 23 bp, synthetic construct
  source 1..23: mol_type = other DNA
ttcccagaggaggtgaccctgaa

SEQ ID NO: 7226 - DNA, 23 bp, synthetic construct
  source 1..23: mol_type = other DNA
cttcccagaggaggtgaccctga

SEQ ID NO: 7227 - DNA, 23 bp, synthetic construct
  source 1..23: mol_type = other DNA
gcttcccagaggaggtgaccctg

SEQ ID NO: 7228 - DNA, 23 bp, synthetic construct
  source 1..23: mol_type = other DNA
ggcttcccagaggaggtgaccct

SEQ ID NO: 7229 - DNA, 23 bp, synthetic construct
  source 1..23: mol_type = other DNA
gggcttcccagaggaggtgaccc

SEQ ID NO: 7230 - DNA, 23 bp, synthetic construct
  source 1..23: mol_type = other DNA
tgggcttcccagaggaggtgacc

SEQ ID NO: 7231 - DNA, 23 bp, synthetic construct
  source 1..23: mol_type = other DNA
gtgggcttcccagaggaggtgac

SEQ ID NO: 7232 - DNA, 23 bp, synthetic construct
  source 1..23: mol_type = other DNA
ggtgggcttcccagaggaggtga

SEQ ID NO: 7233 - DNA, 23 bp, synthetic construct
  source 1..23: mol_type = other DNA
aggtgggcttcccagaggaggtg

SEQ ID NO: 7234 - DNA, 23 bp, synthetic construct
  source 1..23: mol_type = other DNA
aaggtgggcttcccagaggaggt

SEQ ID NO: 7235 - DNA, 23 bp, synthetic construct
  source 1..23: mol_type = other DNA
caaggtgggcttcccagaggagg

SEQ ID NO: 7236 - DNA, 23 bp, synthetic construct
  source 1..23: mol_type = other DNA
ccaaggtgggcttcccagaggag

SEQ ID NO: 7237 - DNA, 23 bp, synthetic construct
  source 1..23: mol_type = other DNA
gccaaggtgggcttcccagagga

SEQ ID NO: 7238 - DNA, 23 bp, synthetic construct
  source 1..23: mol_type = other DNA
ggccaaggtgggcttcccagagg

SEQ ID NO: 7239 - DNA, 23 bp, synthetic construct
  source 1..23: mol_type = other DNA
aggccaaggtgggcttcccagag

SEQ ID NO: 7240 - DNA, 23 bp, synthetic construct
  source 1..23: mol_type = other DNA
gaggccaaggtgggcttcccaga

SEQ ID NO: 7241 - DNA, 23 bp, synthetic construct
  source 1..23: mol_type = other DNA
ggaggccaaggtgggcttcccag

SEQ ID NO: 7242 - DNA, 23 bp, synthetic construct
  source 1..23: mol_type = other DNA
tggaggccaaggtgggcttccca

SEQ ID NO: 7243 - DNA, 23 bp, synthetic construct
  source 1..23: mol_type = other DNA
ctggaggccaaggtgggcttccc

SEQ ID NO: 7244 - DNA, 23 bp, synthetic construct
  source 1..23: mol_type = other DNA
cctggaggccaaggtgggcttcc

SEQ ID NO: 7245 - DNA, 23 bp, synthetic construct
  source 1..23: mol_type = other DNA
acctggaggccaaggtgggcttc

SEQ ID NO: 7246 - DNA, 23 bp, synthetic construct
  source 1..23: mol_type = other DNA
aacctggaggccaaggtgggctt

SEQ ID NO: 7247 - DNA, 23 bp, synthetic construct
  source 1..23: mol_type = other DNA
caacctggaggccaaggtgggct

SEQ ID NO: 7248 - DNA, 23 bp, synthetic construct
  source 1..23: mol_type = other DNA
tcaacctggaggccaaggtgggc

SEQ ID NO: 7249 - DNA, 23 bp, synthetic construct
  source 1..23: mol_type = other DNA
gtcaacctggaggccaaggtggg

SEQ ID NO: 7250 - DNA, 23 bp, synthetic construct
  source 1..23: mol_type = other DNA
agtcaacctggaggccaaggtgg

SEQ ID NO: 7251 - DNA, 23 bp, synthetic construct
  source 1..23: mol_type = other DNA
gagtcaacctggaggccaaggtg

SEQ ID NO: 7252 - DNA, 23 bp, synthetic construct
  source 1..23: mol_type = other DNA
agagtcaacctggaggccaaggt

SEQ ID NO: 7253 - DNA, 23 bp, synthetic construct
  source 1..23: mol_type = other DNA
gagagtcaacctggaggccaagg

SEQ ID NO: 7254 - DNA, 23 bp, synthetic construct
  source 1..23: mol_type = other DNA
tgagagtcaacctggaggccaag

SEQ ID NO: 7255 - DNA, 23 bp, synthetic construct
  source 1..23: mol_type = other DNA
gtgagagtcaacctggaggccaa

SEQ ID NO: 7256 - DNA, 23 bp, synthetic construct
  source 1..23: mol_type = other DNA
agtgagagtcaacctggaggcca

SEQ ID NO: 7257 - DNA, 23 bp, synthetic construct
  source 1..23: mol_type = other DNA
tagtgagagtcaacctggaggcc

SEQ ID NO: 7258 - DNA, 23 bp, synthetic construct
  source 1..23: mol_type = other DNA
gtagtgagagtcaacctggaggc

SEQ ID NO: 7259 - DNA, 23 bp, synthetic construct
  source 1..23: mol_type = other DNA
agtagtgagagtcaacctggagg

SEQ ID NO: 7260 - DNA, 23 bp, synthetic construct
  source 1..23: mol_type = other DNA
gagtagtgagagtcaacctggag

SEQ ID NO: 7261 - DNA, 23 bp, synthetic construct
  source 1..23: mol_type = other DNA
tgagtagtgagagtcaacctgga

SEQ ID NO: 7262 - DNA, 23 bp, synthetic construct
  source 1..23: mol_type = other DNA
atgagtagtgagagtcaacctgg

SEQ ID NO: 7263 - DNA, 23 bp, synthetic construct
  source 1..23: mol_type = other DNA
gatgagtagtgagagtcaacctg

SEQ ID NO: 7264 - DNA, 23 bp, synthetic construct
  source 1..23: mol_type = other DNA
tgatgagtagtgagagtcaacct

SEQ ID NO: 7265 - DNA, 23 bp, synthetic construct
  source 1..23: mol_type = other DNA
atgatgagtagtgagagtcaacc

SEQ ID NO: 7266 - DNA, 23 bp, synthetic construct
  source 1..23: mol_type = other DNA
gatgatgagtagtgagagtcaac

SEQ ID NO: 7267 - DNA, 23 bp, synthetic construct
  source 1..23: mol_type = other DNA
tgatgatgagtagtgagagtcaa

SEQ ID NO: 7268 - DNA, 23 bp, synthetic construct
  source 1..23: mol_type = other DNA
ctgatgatgagtagtgagagtca

SEQ ID NO: 7269 - DNA, 23 bp, synthetic construct
  source 1..23: mol_type = other DNA
cctgatgatgagtagtgagagtc

SEQ ID NO: 7270 - DNA, 23 bp, synthetic construct
  source 1..23: mol_type = other DNA
acctgatgatgagtagtgagagt

SEQ ID NO: 7271 - DNA, 23 bp, synthetic construct
  source 1..23: mol_type = other DNA
aacctgatgatgagtagtgagag

SEQ ID NO: 7272 - DNA, 23 bp, synthetic construct
  source 1..23: mol_type = other DNA
gaacctgatgatgagtagtgaga

SEQ ID NO: 7273 - DNA, 23 bp, synthetic construct
  source 1..23: mol_type = other DNA
agaacctgatgatgagtagtgag

SEQ ID NO: 7274 - DNA, 23 bp, synthetic construct
  source 1..23: mol_type = other DNA
aagaacctgatgatgagtagtga

SEQ ID NO: 7275 - DNA, 23 bp, synthetic construct
  source 1..23: mol_type = other DNA
gaagaacctgatgatgagtagtg

SEQ ID NO: 7276 - DNA, 23 bp, synthetic construct
  source 1..23: mol_type = other DNA
ggaagaacctgatgatgagtagt

SEQ ID NO: 7277 - DNA, 23 bp, synthetic construct
  source 1..23: mol_type = other DNA
aggaagaacctgatgatgagtag

SEQ ID NO: 7278 - DNA, 23 bp, synthetic construct
  source 1..23: mol_type = other DNA
aaggaagaacctgatgatgagta

SEQ ID NO: 7279 - DNA, 23 bp, synthetic construct
  source 1..23: mol_type = other DNA
gaaggaagaacctgatgatgagt

SEQ ID NO: 7280 - DNA, 23 bp, synthetic construct
  source 1..23: mol_type = other DNA
agaaggaagaacctgatgatgag

SEQ ID NO: 7281 - DNA, 23 bp, synthetic construct
  source 1..23: mol_type = other DNA
tagaaggaagaacctgatgatga

SEQ ID NO: 7282 - DNA, 23 bp, synthetic construct
  source 1..23: mol_type = other DNA
atagaaggaagaacctgatgatg

SEQ ID NO: 7283 - DNA, 23 bp, synthetic construct
  source 1..23: mol_type = other DNA
aatagaaggaagaacctgatgat

SEQ ID NO: 7284 - DNA, 23 bp, synthetic construct
  source 1..23: mol_type = other DNA
gaatagaaggaagaacctgatga

SEQ ID NO: 7285 - DNA, 23 bp, synthetic construct
  source 1..23: mol_type = other DNA
ggaatagaaggaagaacctgatg

SEQ ID NO: 7286 - DNA, 23 bp, synthetic construct
  source 1..23: mol_type = other DNA
tggaatagaaggaagaacctgat

SEQ ID NO: 7287 - DNA, 23 bp, synthetic construct
  source 1..23: mol_type = other DNA
ctggaatagaaggaagaacctga

SEQ ID NO: 7288 - DNA, 23 bp, synthetic construct
  source 1..23: mol_type = other DNA
gctggaatagaaggaagaacctg

SEQ ID NO: 7289 - DNA, 23 bp, synthetic construct
  source 1..23: mol_type = other DNA
ggctggaatagaaggaagaacct

SEQ ID NO: 7290 - DNA, 23 bp, synthetic construct
  source 1..23: mol_type = other DNA
gggctggaatagaaggaagaacc

SEQ ID NO: 7291 - DNA, 23 bp, synthetic construct
  source 1..23: mol_type = other DNA
agggctggaatagaaggaagaac

SEQ ID NO: 7292 - DNA, 23 bp, synthetic construct
  source 1..23: mol_type = other DNA
tagggctggaatagaaggaagaa

SEQ ID NO: 7293 - DNA, 23 bp, synthetic construct
  source 1..23: mol_type = other DNA
ttagggctggaatagaaggaaga

SEQ ID NO: 7294 - DNA, 23 bp, synthetic construct
  source 1..23: mol_type = other DNA
gttagggctggaatagaaggaag

SEQ ID NO: 7295 - DNA, 23 bp, synthetic construct
  source 1..23: mol_type = other DNA
ggttagggctggaatagaaggaa

SEQ ID NO: 7296 - DNA, 23 bp, synthetic construct
  source 1..23: mol_type = other DNA
tggttagggctggaatagaagga

SEQ ID NO: 7297 - DNA, 23 bp, synthetic construct
  source 1..23: mol_type = other DNA
gtggttagggctggaatagaagg

SEQ ID NO: 7298 - DNA, 23 bp, synthetic construct
  source 1..23: mol_type = other DNA
agtggttagggctggaatagaag

SEQ ID NO: 7299 - DNA, 23 bp, synthetic construct
  source 1..23: mol_type = other DNA
gagtggttagggctggaatagaa

SEQ ID NO: 7300 - DNA, 23 bp, synthetic construct
  source 1..23: mol_type = other DNA
tgagtggttagggctggaataga

SEQ ID NO: 7301 - DNA, 23 bp, synthetic construct
  source 1..23: mol_type = other DNA
ctgagtggttagggctggaatag

SEQ ID NO: 7302 - DNA, 23 bp, synthetic construct
  source 1..23: mol_type = other DNA
cctgagtggttagggctggaata

SEQ ID NO: 7303 - DNA, 23 bp, synthetic construct
  source 1..23: mol_type = other DNA
tcctgagtggttagggctggaat

SEQ ID NO: 7304 - DNA, 23 bp, synthetic construct
  source 1..23: mol_type = other DNA
atcctgagtggttagggctggaa

SEQ ID NO: 7305 - DNA, 23 bp, synthetic construct
  source 1..23: mol_type = other DNA
aatcctgagtggttagggctgga

SEQ ID NO: 7306 - DNA, 23 bp, synthetic construct
  source 1..23: mol_type = other DNA
caatcctgagtggttagggctgg

SEQ ID NO: 7307 - DNA, 23 bp, synthetic construct
  source 1..23: mol_type = other DNA
ccaatcctgagtggttagggctg

SEQ ID NO: 7308 - DNA, 23 bp, synthetic construct
  source 1..23: mol_type = other DNA
cccaatcctgagtggttagggct

SEQ ID NO: 7309 - DNA, 23 bp, synthetic construct
  source 1..23: mol_type = other DNA
gcccaatcctgagtggttagggc

SEQ ID NO: 7310 - DNA, 23 bp, synthetic construct
  source 1..23: mol_type = other DNA
ggcccaatcctgagtggttaggg

SEQ ID NO: 7311 - DNA, 23 bp, synthetic construct
  source 1..23: mol_type = other DNA
cggcccaatcctgagtggttagg

SEQ ID NO: 7312 - DNA, 23 bp, synthetic construct
  source 1..23: mol_type = other DNA
acggcccaatcctgagtggttag

SEQ ID NO: 7313 - DNA, 23 bp, synthetic construct
  source 1..23: mol_type = other DNA
aacggcccaatcctgagtggtta

SEQ ID NO: 7314 - DNA, 23 bp, synthetic construct
  source 1..23: mol_type = other DNA
aaacggcccaatcctgagtggtt

SEQ ID NO: 7315 - DNA, 23 bp, synthetic construct
  source 1..23: mol_type = other DNA
caaacggcccaatcctgagtggt

SEQ ID NO: 7316 - DNA, 23 bp, synthetic construct
  source 1..23: mol_type = other DNA
acaaacggcccaatcctgagtgg

SEQ ID NO: 7317 - DNA, 23 bp, synthetic construct
  source 1..23: mol_type = other DNA
cacaaacggcccaatcctgagtg

SEQ ID NO: 7318 - DNA, 23 bp, synthetic construct
  source 1..23: mol_type = other DNA
acacaaacggcccaatcctgagt

SEQ ID NO: 7319 - DNA, 23 bp, synthetic construct
  source 1..23: mol_type = other DNA
gacacaaacggcccaatcctgag

SEQ ID NO: 7320 - DNA, 23 bp, synthetic construct
  source 1..23: mol_type = other DNA
agacacaaacggcccaatcctga

SEQ ID NO: 7321 - DNA, 23 bp, synthetic construct
  source 1..23: mol_type = other DNA
cagacacaaacggcccaatcctg

SEQ ID NO: 7322 - DNA, 23 bp, synthetic construct
  source 1..23: mol_type = other DNA
ccagacacaaacggcccaatcct

SEQ ID NO: 7323 - DNA, 23 bp, synthetic construct
  source 1..23: mol_type = other DNA
cccagacacaaacggcccaatcc

SEQ ID NO: 7324 - DNA, 23 bp, synthetic construct
  source 1..23: mol_type = other DNA
acccagacacaaacggcccaatc

SEQ ID NO: 7325 - DNA, 23 bp, synthetic construct
  source 1..23: mol_type = other DNA
tacccagacacaaacggcccaat

SEQ ID NO: 7326 - DNA, 23 bp, synthetic construct
  source 1..23: mol_type = other DNA
atacccagacacaaacggcccaa

SEQ ID NO: 7327 - DNA, 23 bp, synthetic construct
  source 1..23: mol_type = other DNA
catacccagacacaaacggccca

SEQ ID NO: 7328 - DNA, 23 bp, synthetic construct
  source 1..23: mol_type = other DNA
acatacccagacacaaacggccc

SEQ ID NO: 7329 - DNA, 23 bp, synthetic construct
  source 1..23: mol_type = other DNA
gacatacccagacacaaacggcc

SEQ ID NO: 7330 - DNA, 23 bp, synthetic construct
  source 1..23: mol_type = other DNA
agacatacccagacacaaacggc

SEQ ID NO: 7331 - DNA, 23 bp, synthetic construct
  source 1..23: mol_type = other DNA
gagacatacccagacacaaacgg

SEQ ID NO: 7332 - DNA, 23 bp, synthetic construct
  source 1..23: mol_type = other DNA
agagacatacccagacacaaacg

SEQ ID NO: 7333 - DNA, 23 bp, synthetic construct
  source 1..23: mol_type = other DNA
aagagacatacccagacacaaac

SEQ ID NO: 7334 - DNA, 23 bp, synthetic construct
  source 1..23: mol_type = other DNA
gaagagacatacccagacacaaa

SEQ ID NO: 7335 - DNA, 23 bp, synthetic construct
  source 1..23: mol_type = other DNA
ggaagagacatacccagacacaa

SEQ ID NO: 7336 - DNA, 23 bp, synthetic construct
  source 1..23: mol_type = other DNA
tggaagagacatacccagacaca

SEQ ID NO: 7337 - DNA, 23 bp, synthetic construct
  source 1..23: mol_type = other DNA
ctggaagagacatacccagacac

SEQ ID NO: 7338 - DNA, 23 bp, synthetic construct
  source 1..23: mol_type = other DNA
gctggaagagacatacccagaca

SEQ ID NO: 7339 - DNA, 23 bp, synthetic construct
  source 1..23: mol_type = other DNA
agctggaagagacatacccagac

SEQ ID NO: 7340 - DNA, 23 bp, synthetic construct
  source 1..23: mol_type = other DNA
cagctggaagagacatacccaga

SEQ ID NO: 7341 - DNA, 23 bp, synthetic construct
  source 1..23: mol_type = other DNA
gcagctggaagagacatacccag

SEQ ID NO: 7342 - DNA, 23 bp, synthetic construct
  source 1..23: mol_type = other DNA
ggcagctggaagagacataccca

SEQ ID NO: 7343 - DNA, 23 bp, synthetic construct
  source 1..23: mol_type = other DNA
aggcagctggaagagacataccc

SEQ ID NO: 7344 - DNA, 23 bp, synthetic construct
  source 1..23: mol_type = other DNA
caggcagctggaagagacatacc

SEQ ID NO: 7345 - DNA, 23 bp, synthetic construct
  source 1..23: mol_type = other DNA
ccaggcagctggaagagacatac

SEQ ID NO: 7346 - DNA, 23 bp, synthetic construct
  source 1..23: mol_type = other DNA
cccaggcagctggaagagacata

SEQ ID NO: 7347 - DNA, 23 bp, synthetic construct
  source 1..23: mol_type = other DNA
acccaggcagctggaagagacat

SEQ ID NO: 7348 - DNA, 23 bp, synthetic construct
  source 1..23: mol_type = other DNA
aacccaggcagctggaagagaca

SEQ ID NO: 7349 - DNA, 23 bp, synthetic construct
  source 1..23: mol_type = other DNA
aaacccaggcagctggaagagac

SEQ ID NO: 7350 - DNA, 23 bp, synthetic construct
  source 1..23: mol_type = other DNA
gaaacccaggcagctggaagaga

SEQ ID NO: 7351 - DNA, 23 bp, synthetic construct
  source 1..23: mol_type = other DNA
ggaaacccaggcagctggaagag

SEQ ID NO: 7352 - DNA, 23 bp, synthetic construct
  source 1..23: mol_type = other DNA
aggaaacccaggcagctggaaga

SEQ ID NO: 7353 - DNA, 23 bp, synthetic construct
  source 1..23: mol_type = other DNA
caggaaacccaggcagctggaag

SEQ ID NO: 7354 - DNA, 23 bp, synthetic construct
  source 1..23: mol_type = other DNA
ccaggaaacccaggcagctggaa

SEQ ID NO: 7355 - DNA, 23 bp, synthetic construct
  source 1..23: mol_type = other DNA
tccaggaaacccaggcagctgga

SEQ ID NO: 7356 - DNA, 23 bp, synthetic construct
  source 1..23: mol_type = other DNA
ttccaggaaacccaggcagctgg

SEQ ID NO: 7357 - DNA, 23 bp, synthetic construct
  source 1..23: mol_type = other DNA
tttccaggaaacccaggcagctg

SEQ ID NO: 7358 - DNA, 23 bp, synthetic construct
  source 1..23: mol_type = other DNA
ctttccaggaaacccaggcagct

SEQ ID NO: 7359 - DNA, 23 bp, synthetic construct
  source 1..23: mol_type = other DNA
tctttccaggaaacccaggcagc

SEQ ID NO: 7360 - DNA, 23 bp, synthetic construct
  source 1..23: mol_type = other DNA
ttctttccaggaaacccaggcag

SEQ ID NO: 7361 - DNA, 23 bp, synthetic construct
  source 1..23: mol_type = other DNA
gttctttccaggaaacccaggca

SEQ ID NO: 7362 - DNA, 23 bp, synthetic construct
  source 1..23: mol_type = other DNA
agttctttccaggaaacccaggc

SEQ ID NO: 7363 - DNA, 23 bp, synthetic construct
  source 1..23: mol_type = other DNA
gagttctttccaggaaacccagg

SEQ ID NO: 7364 - DNA, 23 bp, synthetic construct
  source 1..23: mol_type = other DNA
agagttctttccaggaaacccag

SEQ ID NO: 7365 - DNA, 23 bp, synthetic construct
  source 1..23: mol_type = other DNA
aagagttctttccaggaaaccca

SEQ ID NO: 7366 - DNA, 23 bp, synthetic construct
  source 1..23: mol_type = other DNA
taagagttctttccaggaaaccc

SEQ ID NO: 7367 - DNA, 23 bp, synthetic construct
  source 1..23: mol_type = other DNA
ataagagttctttccaggaaacc

SEQ ID NO: 7368 - DNA, 23 bp, synthetic construct
  source 1..23: mol_type = other DNA
gataagagttctttccaggaaac

SEQ ID NO: 7369 - DNA, 23 bp, synthetic construct
  source 1..23: mol_type = other DNA
ggataagagttctttccaggaaa

SEQ ID NO: 7370 - DNA, 23 bp, synthetic construct
  source 1..23: mol_type = other DNA
gggataagagttctttccaggaa

SEQ ID NO: 7371 - DNA, 23 bp, synthetic construct
  source 1..23: mol_type = other DNA
ggggataagagttctttccagga

SEQ ID NO: 7372 - DNA, 23 bp, synthetic construct
  source 1..23: mol_type = other DNA
tggggataagagttctttccagg

SEQ ID NO: 7373 - DNA, 23 bp, synthetic construct
  source 1..23: mol_type = other DNA
ctggggataagagttctttccag

SEQ ID NO: 7374 - DNA, 23 bp, synthetic construct
  source 1..23: mol_type = other DNA
cctggggataagagttctttcca

SEQ ID NO: 7375 - DNA, 23 bp, synthetic construct
  source 1..23: mol_type = other DNA
tcctggggataagagttctttcc

SEQ ID NO: 7376 - DNA, 23 bp, synthetic construct
  source 1..23: mol_type = other DNA
ttcctggggataagagttctttc

SEQ ID NO: 7377 - DNA, 23 bp, synthetic construct
  source 1..23: mol_type = other DNA
gttcctggggataagagttcttt

SEQ ID NO: 7378 - DNA, 23 bp, synthetic construct
  source 1..23: mol_type = other DNA
agttcctggggataagagttctt

SEQ ID NO: 7379 - DNA, 23 bp, synthetic construct
  source 1..23: mol_type = other DNA
tagttcctggggataagagttct

SEQ ID NO: 7380 - DNA, 23 bp, synthetic construct
  source 1..23: mol_type = other DNA
ctagttcctggggataagagttc

SEQ ID NO: 7381 - DNA, 23 bp, synthetic construct
  source 1..23: mol_type = other DNA
actagttcctggggataagagtt

SEQ ID NO: 7382 - DNA, 23 bp, synthetic construct
  source 1..23: mol_type = other DNA
aactagttcctggggataagagt

SEQ ID NO: 7383 - DNA, 23 bp, synthetic construct
  source 1..23: mol_type = other DNA
aaactagttcctggggataagag

SEQ ID NO: 7384 - DNA, 23 bp, synthetic construct
  source 1..23: mol_type = other DNA
caaactagttcctggggataaga

SEQ ID NO: 7385 - DNA, 23 bp, synthetic construct
  source 1..23: mol_type = other DNA
acaaactagttcctggggataag

SEQ ID NO: 7386 - DNA, 23 bp, synthetic construct
  source 1..23: mol_type = other DNA
aacaaactagttcctggggataa

SEQ ID NO: 7387 - DNA, 23 bp, synthetic construct
  source 1..23: mol_type = other DNA
caacaaactagttcctggggata

SEQ ID NO: 7388 - DNA, 23 bp, synthetic construct
  source 1..23: mol_type = other DNA
tcaacaaactagttcctggggat

SEQ ID NO: 7389 - DNA, 23 bp, synthetic construct
  source 1..23: mol_type = other DNA
ttcaacaaactagttcctgggga

SEQ ID NO: 7390 - DNA, 23 bp, synthetic construct
  source 1..23: mol_type = other DNA
attcaacaaactagttcctgggg

SEQ ID NO: 7391 - DNA, 23 bp, synthetic construct
  source 1..23: mol_type = other DNA
tattcaacaaactagttcctggg

SEQ ID NO: 7392 - DNA, 23 bp, synthetic construct
  source 1..23: mol_type = other DNA
ttattcaacaaactagttcctgg

SEQ ID NO: 7393 - DNA, 23 bp, synthetic construct
  source 1..23: mol_type = other DNA
tttattcaacaaactagttcctg

SEQ ID NO: 7394 - DNA, 23 bp, synthetic construct
  source 1..23: mol_type = other DNA
atttattcaacaaactagttcct

SEQ ID NO: 7395 - DNA, 23 bp, synthetic construct
  source 1..23: mol_type = other DNA
catttattcaacaaactagttcc

SEQ ID NO: 7396 - DNA, 23 bp, synthetic construct
  source 1..23: mol_type = other DNA
gcatttattcaacaaactagttc

SEQ ID NO: 7397 - DNA, 23 bp, synthetic construct
  source 1..23: mol_type = other DNA
agcatttattcaacaaactagtt

SEQ ID NO: 7398 - DNA, 23 bp, synthetic construct
  source 1..23: mol_type = other DNA
cagcatttattcaacaaactagt

SEQ ID NO: 7399 - DNA, 23 bp, synthetic construct
  source 1..23: mol_type = other DNA
ccagcatttattcaacaaactag

SEQ ID NO: 7400 - DNA, 23 bp, synthetic construct
  source 1..23: mol_type = other DNA
accagcatttattcaacaaacta

SEQ ID NO: 7401 - DNA, 23 bp, synthetic construct
  source 1..23: mol_type = other DNA
caccagcatttattcaacaaact

SEQ ID NO: 7402 - DNA, 23 bp, synthetic construct
  source 1..23: mol_type = other DNA
tcaccagcatttattcaacaaac

SEQ ID NO: 7403 - DNA, 23 bp, synthetic construct
  source 1..23: mol_type = other DNA
ttcaccagcatttattcaacaaa

SEQ ID NO: 7404 - DNA, 23 bp, synthetic construct
  source 1..23: mol_type = other DNA
attcaccagcatttattcaacaa

SEQ ID NO: 7405 - DNA, 23 bp, synthetic construct
  source 1..23: mol_type = other DNA
cattcaccagcatttattcaaca

SEQ ID NO: 7406 - DNA, 23 bp, synthetic construct
  source 1..23: mol_type = other DNA
tcattcaccagcatttattcaac

SEQ ID NO: 7407 - DNA, 23 bp, synthetic construct
  source 1..23: mol_type = other DNA
ttcattcaccagcatttattcaa

SEQ ID NO: 7408 - DNA, 23 bp, synthetic construct
  source 1..23: mol_type = other DNA
attcattcaccagcatttattca

SEQ ID NO: 7409 - DNA, 23 bp, synthetic construct
  source 1..23: mol_type = other DNA
cattcattcaccagcatttattc

SEQ ID NO: 7410 - DNA, 23 bp, synthetic construct
  source 1..23: mol_type = other DNA
tcattcattcaccagcatttatt

SEQ ID NO: 7411 - DNA, 23 bp, synthetic construct
  source 1..23: mol_type = other DNA
ttcattcattcaccagcatttat

SEQ ID NO: 7412 - DNA, 23 bp, synthetic construct
  source 1..23: mol_type = other DNA
attcattcattcaccagcattta

SEQ ID NO: 7413 - DNA, 23 bp, synthetic construct
  source 1..23: mol_type = other DNA
cattcattcattcaccagcattt

SEQ ID NO: 7414 - DNA, 23 bp, synthetic construct
  source 1..23: mol_type = other DNA
tcattcattcattcaccagcatt

SEQ ID NO: 7415 - DNA, 23 bp, synthetic construct
  source 1..23: mol_type = other DNA
atcattcattcattcaccagcat

SEQ ID NO: 7416 - DNA, 23 bp, synthetic construct
  source 1..23: mol_type = other DNA
aatcattcattcattcaccagca

SEQ ID NO: 7417 - DNA, 23 bp, synthetic construct
  source 1..23: mol_type = other DNA
caatcattcattcattcaccagc

SEQ ID NO: 7418 - DNA, 23 bp, synthetic construct
  source 1..23: mol_type = other DNA
tcaatcattcattcattcaccag

SEQ ID NO: 7419 - DNA, 23 bp, synthetic construct
  source 1..23: mol_type = other DNA
ttcaatcattcattcattcacca

SEQ ID NO: 7420 - DNA, 23 bp, synthetic construct
  source 1..23: mol_type = other DNA
gttcaatcattcattcattcacc

SEQ ID NO: 7421 - DNA, 23 bp, synthetic construct
  source 1..23: mol_type = other DNA
tgttcaatcattcattcattcac

SEQ ID NO: 7422 - DNA, 23 bp, synthetic construct
  source 1..23: mol_type = other DNA
ctgttcaatcattcattcattca

SEQ ID NO: 7423 - DNA, 23 bp, synthetic construct
  source 1..23: mol_type = other DNA
tctgttcaatcattcattcattc

SEQ ID NO: 7424 - DNA, 23 bp, synthetic construct
  source 1..23: mol_type = other DNA
atctgttcaatcattcattcatt

SEQ ID NO: 7425 - DNA, 23 bp, synthetic construct
  source 1..23: mol_type = other DNA
catctgttcaatcattcattcat

SEQ ID NO: 7426 - DNA, 23 bp, synthetic construct
  source 1..23: mol_type = other DNA
tcatctgttcaatcattcattca

SEQ ID NO: 7427 - DNA, 23 bp, synthetic construct
  source 1..23: mol_type = other DNA
ttcatctgttcaatcattcattc

SEQ ID NO: 7428 - DNA, 23 bp, synthetic construct
  source 1..23: mol_type = other DNA
attcatctgttcaatcattcatt

SEQ ID NO: 7429 - DNA, 23 bp, synthetic construct
  source 1..23: mol_type = other DNA
cattcatctgttcaatcattcat

SEQ ID NO: 7430 - DNA, 23 bp, synthetic construct
  source 1..23: mol_type = other DNA
tcattcatctgttcaatcattca

SEQ ID NO: 7431 - DNA, 23 bp, synthetic construct
  source 1..23: mol_type = other DNA
ctcattcatctgttcaatcattc

SEQ ID NO: 7432 - DNA, 23 bp, synthetic construct
  source 1..23: mol_type = other DNA
actcattcatctgttcaatcatt

SEQ ID NO: 7433 - DNA, 23 bp, synthetic construct
  source 1..23: mol_type = other DNA
cactcattcatctgttcaatcat

SEQ ID NO: 7434 - DNA, 23 bp, synthetic construct
  source 1..23: mol_type = other DNA
tcactcattcatctgttcaatca

SEQ ID NO: 7435 - DNA, 23 bp, synthetic construct
  source 1..23: mol_type = other DNA
atcactcattcatctgttcaatc

SEQ ID NO: 7436 - DNA, 23 bp, synthetic construct
  source 1..23: mol_type = other DNA
catcactcattcatctgttcaat

SEQ ID NO: 7437 - DNA, 23 bp, synthetic construct
  source 1..23: mol_type = other DNA
tcatcactcattcatctgttcaa

SEQ ID NO: 7438 - DNA, 23 bp, synthetic construct
  source 1..23: mol_type = other DNA
ctcatcactcattcatctgttca

SEQ ID NO: 7439 - DNA, 23 bp, synthetic construct
  source 1..23: mol_type = other DNA
actcatcactcattcatctgttc

SEQ ID NO: 7440 - DNA, 23 bp, synthetic construct
  source 1..23: mol_type = other DNA
tactcatcactcattcatctgtt

SEQ ID NO: 7441 - DNA, 23 bp, synthetic construct
  source 1..23: mol_type = other DNA
ctactcatcactcattcatctgt

SEQ ID NO: 7442 - DNA, 23 bp, synthetic construct
  source 1..23: mol_type = other DNA
tctactcatcactcattcatctg

SEQ ID NO: 7443 - DNA, 23 bp, synthetic construct
  source 1..23: mol_type = other DNA
atctactcatcactcattcatct

SEQ ID NO: 7444 - DNA, 23 bp, synthetic construct
  source 1..23: mol_type = other DNA
tatctactcatcactcattcatc

SEQ ID NO: 7445 - DNA, 23 bp, synthetic construct
  source 1..23: mol_type = other DNA
ttatctactcatcactcattcat

SEQ ID NO: 7446 - DNA, 23 bp, synthetic construct
  source 1..23: mol_type = other DNA
tttatctactcatcactcattca

SEQ ID NO: 7447 - DNA, 23 bp, synthetic construct
  source 1..23: mol_type = other DNA
ttttatctactcatcactcattc

SEQ ID NO: 7448 - DNA, 23 bp, synthetic construct
  source 1..23: mol_type = other DNA
cttttatctactcatcactcatt

SEQ ID NO: 7449 - DNA, 23 bp, synthetic construct
  source 1..23: mol_type = other DNA
ccttttatctactcatcactcat

SEQ ID NO: 7450 - DNA, 23 bp, synthetic construct
  source 1..23: mol_type = other DNA
tccttttatctactcatcactca

SEQ ID NO: 7451 - DNA, 23 bp, synthetic construct
  source 1..23: mol_type = other DNA
atccttttatctactcatcactc

SEQ ID NO: 7452 - DNA, 23 bp, synthetic construct
  source 1..23: mol_type = other DNA
catccttttatctactcatcact

SEQ ID NO: 7453 - DNA, 23 bp, synthetic construct
  source 1..23: mol_type = other DNA
ccatccttttatctactcatcac

SEQ ID NO: 7454 - DNA, 23 bp, synthetic construct
  source 1..23: mol_type = other DNA
tccatccttttatctactcatca

SEQ ID NO: 7455 - DNA, 23 bp, synthetic construct
  source 1..23: mol_type = other DNA
atccatccttttatctactcatc

SEQ ID NO: 7456 - DNA, 23 bp, synthetic construct
  source 1..23: mol_type = other DNA
catccatccttttatctactcat

SEQ ID NO: 7457 - DNA, 23 bp, synthetic construct
  source 1..23: mol_type = other DNA
ccatccatccttttatctactca

SEQ ID NO: 7458 - DNA, 23 bp, synthetic construct
  source 1..23: mol_type = other DNA
tccatccatccttttatctactc

SEQ ID NO: 7459 - DNA, 23 bp, synthetic construct
  source 1..23: mol_type = other DNA
ctccatccatccttttatctact

SEQ ID NO: 7460 - DNA, 23 bp, synthetic construct
  source 1..23: mol_type = other DNA
tctccatccatccttttatctac

SEQ ID NO: 7461 - DNA, 23 bp, synthetic construct
  source 1..23: mol_type = other DNA
ctctccatccatccttttatcta

SEQ ID NO: 7462 - DNA, 23 bp, synthetic construct
  source 1..23: mol_type = other DNA
tctctccatccatccttttatct

SEQ ID NO: 7463 - DNA, 23 bp, synthetic construct
  source 1..23: mol_type = other DNA
atctctccatccatccttttatc

SEQ ID NO: 7464 - DNA, 23 bp, synthetic construct
  source 1..23: mol_type = other DNA
catctctccatccatccttttat

SEQ ID NO: 7465 - DNA, 23 bp, synthetic construct
  source 1..23: mol_type = other DNA
ccatctctccatccatcctttta

SEQ ID NO: 7466 - DNA, 23 bp, synthetic construct
  source 1..23: mol_type = other DNA
cccatctctccatccatcctttt

SEQ ID NO: 7467 - DNA, 23 bp, synthetic construct
  source 1..23: mol_type = other DNA
acccatctctccatccatccttt

SEQ ID NO: 7468 - DNA, 23 bp, synthetic construct
  source 1..23: mol_type = other DNA
cacccatctctccatccatcctt

SEQ ID NO: 7469 - DNA, 23 bp, synthetic construct
  source 1..23: mol_type = other DNA
tcacccatctctccatccatcct

SEQ ID NO: 7470 - DNA, 23 bp, synthetic construct
  source 1..23: mol_type = other DNA
ctcacccatctctccatccatcc

SEQ ID NO: 7471 - DNA, 23 bp, synthetic construct
  source 1..23: mol_type = other DNA
actcacccatctctccatccatc

SEQ ID NO: 7472 - DNA, 23 bp, synthetic construct
  source 1..23: mol_type = other DNA
tactcacccatctctccatccat

SEQ ID NO: 7473 - DNA, 23 bp, synthetic construct
  source 1..23: mol_type = other DNA
gtactcacccatctctccatcca

SEQ ID NO: 7474 - DNA, 23 bp, synthetic construct
  source 1..23: mol_type = other DNA
tgtactcacccatctctccatcc

SEQ ID NO: 7475 - DNA, 23 bp, synthetic construct
  source 1..23: mol_type = other DNA
atgtactcacccatctctccatc

SEQ ID NO: 7476 - DNA, 23 bp, synthetic construct
  source 1..23: mol_type = other DNA
catgtactcacccatctctccat

SEQ ID NO: 7477 - DNA, 23 bp, synthetic construct
  source 1..23: mol_type = other DNA
ccatgtactcacccatctctcca

SEQ ID NO: 7478 - DNA, 23 bp, synthetic construct
  source 1..23: mol_type = other DNA
tccatgtactcacccatctctcc

SEQ ID NO: 7479 - DNA, 23 bp, synthetic construct
  source 1..23: mol_type = other DNA
atccatgtactcacccatctctc

SEQ ID NO: 7480 - DNA, 23 bp, synthetic construct
  source 1..23: mol_type = other DNA
catccatgtactcacccatctct

SEQ ID NO: 7481 - DNA, 23 bp, synthetic construct
  source 1..23: mol_type = other DNA
ccatccatgtactcacccatctc

SEQ ID NO: 7482 - DNA, 23 bp, synthetic construct
  source 1..23: mol_type = other DNA
tccatccatgtactcacccatct

SEQ ID NO: 7483 - DNA, 23 bp, synthetic construct
  source 1..23: mol_type = other DNA
atccatccatgtactcacccatc

SEQ ID NO: 7484 - DNA, 23 bp, synthetic construct
  source 1..23: mol_type = other DNA
tatccatccatgtactcacccat

SEQ ID NO: 7485 - DNA, 23 bp, synthetic construct
  source 1..23: mol_type = other DNA
ctatccatccatgtactcaccca

SEQ ID NO: 7486 - DNA, 23 bp, synthetic construct
  source 1..23: mol_type = other DNA
tctatccatccatgtactcaccc

SEQ ID NO: 7487 - DNA, 23 bp, synthetic construct
  source 1..23: mol_type = other DNA
atctatccatccatgtactcacc

SEQ ID NO: 7488 - DNA, 23 bp, synthetic construct
  source 1..23: mol_type = other DNA
catctatccatccatgtactcac

SEQ ID NO: 7489 - DNA, 23 bp, synthetic construct
  source 1..23: mol_type = other DNA
ccatctatccatccatgtactca

SEQ ID NO: 7490 - DNA, 23 bp, synthetic construct
  source 1..23: mol_type = other DNA
tccatctatccatccatgtactc

SEQ ID NO: 7491 - DNA, 23 bp, synthetic construct
  source 1..23: mol_type = other DNA
atccatctatccatccatgtact

SEQ ID NO: 7492 - DNA, 23 bp, synthetic construct
  source 1..23: mol_type = other DNA
catccatctatccatccatgtac

SEQ ID NO: 7493 - DNA, 23 bp, synthetic construct
  source 1..23: mol_type = other DNA
tcatccatctatccatccatgta

SEQ ID NO: 7494 - DNA, 23 bp, synthetic construct
  source 1..23: mol_type = other DNA
ctcatccatctatccatccatgt

SEQ ID NO: 7495 - DNA, 23 bp, synthetic construct
  source 1..23: mol_type = other DNA
actcatccatctatccatccatg

SEQ ID NO: 7496 - DNA, 23 bp, synthetic construct
  source 1..23: mol_type = other DNA
aactcatccatctatccatccat

SEQ ID NO: 7497 - DNA, 23 bp, synthetic construct
  source 1..23: mol_type = other DNA
caactcatccatctatccatcca

SEQ ID NO: 7498 - DNA, 23 bp, synthetic construct
  source 1..23: mol_type = other DNA
ccaactcatccatctatccatcc

SEQ ID NO: 7499 - DNA, 23 bp, synthetic construct
  source 1..23: mol_type = other DNA
accaactcatccatctatccatc

SEQ ID NO: 7500 - DNA, 23 bp, synthetic construct
  source 1..23: mol_type = other DNA
caccaactcatccatctatccat

SEQ ID NO: 7501 - DNA, 23 bp, synthetic construct
  source 1..23: mol_type = other DNA
ccaccaactcatccatctatcca

SEQ ID NO: 7502 - DNA, 23 bp, synthetic construct
  source 1..23: mol_type = other DNA
cccaccaactcatccatctatcc

SEQ ID NO: 7503 - DNA, 23 bp, synthetic construct
  source 1..23: mol_type = other DNA
acccaccaactcatccatctatc

SEQ ID NO: 7504 - DNA, 23 bp, synthetic construct
  source 1..23: mol_type = other DNA
tacccaccaactcatccatctat

SEQ ID NO: 7505 - DNA, 23 bp, synthetic construct
  source 1..23: mol_type = other DNA
ctacccaccaactcatccatcta

SEQ ID NO: 7506 - DNA, 23 bp, synthetic construct
  source 1..23: mol_type = other DNA
tctacccaccaactcatccatct

SEQ ID NO: 7507 - DNA, 23 bp, synthetic construct
  source 1..23: mol_type = other DNA
atctacccaccaactcatccatc

SEQ ID NO: 7508 - DNA, 23 bp, synthetic construct
  source 1..23: mol_type = other DNA
aatctacccaccaactcatccat

SEQ ID NO: 7509 - DNA, 23 bp, synthetic construct
  source 1..23: mol_type = other DNA
gaatctacccaccaactcatcca

SEQ ID NO: 7510 - DNA, 23 bp, synthetic construct
  source 1..23: mol_type = other DNA
cgaatctacccaccaactcatcc

SEQ ID NO: 7511 - DNA, 23 bp, synthetic construct
  source 1..23: mol_type = other DNA
acgaatctacccaccaactcatc

SEQ ID NO: 7512 - DNA, 23 bp, synthetic construct
  source 1..23: mol_type = other DNA
cacgaatctacccaccaactcat

SEQ ID NO: 7513 - DNA, 23 bp, synthetic construct
  source 1..23: mol_type = other DNA
ccacgaatctacccaccaactca

SEQ ID NO: 7514 - DNA, 23 bp, synthetic construct
  source 1..23: mol_type = other DNA
gccacgaatctacccaccaactc

SEQ ID NO: 7515 - DNA, 23 bp, synthetic construct
  source 1..23: mol_type = other DNA
agccacgaatctacccaccaact

SEQ ID NO: 7516 - DNA, 23 bp, synthetic construct
  source 1..23: mol_type = other DNA
tagccacgaatctacccaccaac

SEQ ID NO: 7517 - DNA, 23 bp, synthetic construct
  source 1..23: mol_type = other DNA
ctagccacgaatctacccaccaa

SEQ ID NO: 7518 - DNA, 23 bp, synthetic construct
  source 1..23: mol_type = other DNA
tctagccacgaatctacccacca

SEQ ID NO: 7519 - DNA, 23 bp, synthetic construct
  source 1..23: mol_type = other DNA
atctagccacgaatctacccacc

SEQ ID NO: 7520 - DNA, 23 bp, synthetic construct
  source 1..23: mol_type = other DNA
catctagccacgaatctacccac

SEQ ID NO: 7521 - DNA, 23 bp, synthetic construct
  source 1..23: mol_type = other DNA
ccatctagccacgaatctaccca

SEQ ID NO: 7522 - DNA, 23 bp, synthetic construct
  source 1..23: mol_type = other DNA
tccatctagccacgaatctaccc

SEQ ID NO: 7523 - DNA, 23 bp, synthetic construct
  source 1..23: mol_type = other DNA
atccatctagccacgaatctacc

SEQ ID NO: 7524 - DNA, 23 bp, synthetic construct
  source 1..23: mol_type = other DNA
catccatctagccacgaatctac

SEQ ID NO: 7525 - DNA, 23 bp, synthetic construct
  source 1..23: mol_type = other DNA
tcatccatctagccacgaatcta

SEQ ID NO: 7526 - DNA, 23 bp, synthetic construct
  source 1..23: mol_type = other DNA
atcatccatctagccacgaatct

SEQ ID NO: 7527 - DNA, 23 bp, synthetic construct
  source 1..23: mol_type = other DNA
catcatccatctagccacgaatc

SEQ ID NO: 7528 - DNA, 23 bp, synthetic construct
  source 1..23: mol_type = other DNA
ccatcatccatctagccacgaat

SEQ ID NO: 7529 - DNA, 23 bp, synthetic construct
  source 1..23: mol_type = other DNA
tccatcatccatctagccacgaa

SEQ ID NO: 7530 - DNA, 23 bp, synthetic construct
  source 1..23: mol_type = other DNA
atccatcatccatctagccacga

SEQ ID NO: 7531 - DNA, 23 bp, synthetic construct
  source 1..23: mol_type = other DNA
catccatcatccatctagccacg

SEQ ID NO: 7532 - DNA, 23 bp, synthetic construct
  source 1..23: mol_type = other DNA
ccatccatcatccatctagccac

SEQ ID NO: 7533 - DNA, 23 bp, synthetic construct
  source 1..23: mol_type = other DNA
tccatccatcatccatctagcca

SEQ ID NO: 7534 - DNA, 23 bp, synthetic construct
  source 1..23: mol_type = other DNA
atccatccatcatccatctagcc

SEQ ID NO: 7535 - DNA, 23 bp, synthetic construct
  source 1..23: mol_type = other DNA
catccatccatcatccatctagc

SEQ ID NO: 7536 - DNA, 23 bp, synthetic construct
  source 1..23: mol_type = other DNA
ccatccatccatcatccatctag

SEQ ID NO: 7537 - DNA, 23 bp, synthetic construct
  source 1..23: mol_type = other DNA
tccatccatccatcatccatcta

SEQ ID NO: 7538 - DNA, 23 bp, synthetic construct
  source 1..23: mol_type = other DNA
gtccatccatccatcatccatct

SEQ ID NO: 7539 - DNA, 23 bp, synthetic construct
  source 1..23: mol_type = other DNA
tgtccatccatccatcatccatc

SEQ ID NO: 7540 - DNA, 23 bp, synthetic construct
  source 1..23: mol_type = other DNA
ctgtccatccatccatcatccat

SEQ ID NO: 7541 - DNA, 23 bp, synthetic construct
  source 1..23: mol_type = other DNA
tctgtccatccatccatcatcca

SEQ ID NO: 7542 - DNA, 23 bp, synthetic construct
  source 1..23: mol_type = other DNA
atctgtccatccatccatcatcc

SEQ ID NO: 7543 - DNA, 23 bp, synthetic construct
  source 1..23: mol_type = other DNA
catctgtccatccatccatcatc

SEQ ID NO: 7544 - DNA, 23 bp, synthetic construct
  source 1..23: mol_type = other DNA
ccatctgtccatccatccatcat

SEQ ID NO: 7545 - DNA, 23 bp, synthetic construct
  source 1..23: mol_type = other DNA
tccatctgtccatccatccatca

SEQ ID NO: 7546 - DNA, 23 bp, synthetic construct
  source 1..23: mol_type = other DNA
atccatctgtccatccatccatc

SEQ ID NO: 7547 - DNA, 23 bp, synthetic construct
  source 1..23: mol_type = other DNA
catccatctgtccatccatccat

SEQ ID NO: 7548 - DNA, 23 bp, synthetic construct
  source 1..23: mol_type = other DNA
ccatccatctgtccatccatcca

SEQ ID NO: 7549 - DNA, 23 bp, synthetic construct
  source 1..23: mol_type = other DNA
tccatccatctgtccatccatcc

SEQ ID NO: 7550 - DNA, 23 bp, synthetic construct
  source 1..23: mol_type = other DNA
atccatccatctgtccatccatc

SEQ ID NO: 7551 - DNA, 23 bp, synthetic construct
  source 1..23: mol_type = other DNA
tatccatccatctgtccatccat

SEQ ID NO: 7552 - DNA, 23 bp, synthetic construct
  source 1..23: mol_type = other DNA
atatccatccatctgtccatcca

SEQ ID NO: 7553 - DNA, 23 bp, synthetic construct
  source 1..23: mol_type = other DNA
tatatccatccatctgtccatcc

SEQ ID NO: 7554 - DNA, 23 bp, synthetic construct
  source 1..23: mol_type = other DNA
atatatccatccatctgtccatc

SEQ ID NO: 7555 - DNA, 23 bp, synthetic construct
  source 1..23: mol_type = other DNA
catatatccatccatctgtccat

SEQ ID NO: 7556 - DNA, 23 bp, synthetic construct
  source 1..23: mol_type = other DNA
tcatatatccatccatctgtcca

SEQ ID NO: 7557 - DNA, 23 bp, synthetic construct
  source 1..23: mol_type = other DNA
atcatatatccatccatctgtcc

SEQ ID NO: 7558 - DNA, 23 bp, synthetic construct
  source 1..23: mol_type = other DNA
aatcatatatccatccatctgtc

SEQ ID NO: 7559 - DNA, 23 bp, synthetic construct
  source 1..23: mol_type = other DNA
caatcatatatccatccatctgt

SEQ ID NO: 7560 - DNA, 23 bp, synthetic construct
  source 1..23: mol_type = other DNA
tcaatcatatatccatccatctg

SEQ ID NO: 7561 - DNA, 23 bp, synthetic construct
  source 1..23: mol_type = other DNA
ttcaatcatatatccatccatct

SEQ ID NO: 7562 - DNA, 23 bp, synthetic construct
  source 1..23: mol_type = other DNA
gttcaatcatatatccatccatc

SEQ ID NO: 7563 - DNA, 23 bp, synthetic construct
  source 1..23: mol_type = other DNA
agttcaatcatatatccatccat

SEQ ID NO: 7564 - DNA, 23 bp, synthetic construct
  source 1..23: mol_type = other DNA
tagttcaatcatatatccatcca

SEQ ID NO: 7565 - DNA, 23 bp, synthetic construct
  source 1..23: mol_type = other DNA
atagttcaatcatatatccatcc

SEQ ID NO: 7566 - DNA, 23 bp, synthetic construct
  source 1..23: mol_type = other DNA
aatagttcaatcatatatccatc

SEQ ID NO: 7567 - DNA, 23 bp, synthetic construct
  source 1..23: mol_type = other DNA
caatagttcaatcatatatccat

SEQ ID NO: 7568 - DNA, 23 bp, synthetic construct
  source 1..23: mol_type = other DNA
tcaatagttcaatcatatatcca

SEQ ID NO: 7569 - DNA, 23 bp, synthetic construct
  source 1..23: mol_type = other DNA
ttcaatagttcaatcatatatcc

SEQ ID NO: 7570 - DNA, 23 bp, synthetic construct
  source 1..23: mol_type = other DNA
tttcaatagttcaatcatatatc

SEQ ID NO: 7571 - DNA, 23 bp, synthetic construct
  source 1..23: mol_type = other DNA
ctttcaatagttcaatcatatat

SEQ ID NO: 7572 - DNA, 23 bp, synthetic construct
  source 1..23: mol_type = other DNA
actttcaatagttcaatcatata

SEQ ID NO: 7573 - DNA, 23 bp, synthetic construct
  source 1..23: mol_type = other DNA
tactttcaatagttcaatcatat

SEQ ID NO: 7574 - DNA, 23 bp, synthetic construct
  source 1..23: mol_type = other DNA
atactttcaatagttcaatcata

SEQ ID NO: 7575 - DNA, 23 bp, synthetic construct
  source 1..23: mol_type = other DNA
tatactttcaatagttcaatcat

SEQ ID NO: 7576 - DNA, 23 bp, synthetic construct
  source 1..23: mol_type = other DNA
ctatactttcaatagttcaatca

SEQ ID NO: 7577 - DNA, 23 bp, synthetic construct
  source 1..23: mol_type = other DNA
tctatactttcaatagttcaatc

SEQ ID NO: 7578 - DNA, 23 bp, synthetic construct
  source 1..23: mol_type = other DNA
atctatactttcaatagttcaat

SEQ ID NO: 7579 - DNA, 23 bp, synthetic construct
  source 1..23: mol_type = other DNA
catctatactttcaatagttcaa

SEQ ID NO: 7580 - DNA, 23 bp, synthetic construct
  source 1..23: mol_type = other DNA
acatctatactttcaatagttca

SEQ ID NO: 7581 - DNA, 23 bp, synthetic construct
  source 1..23: mol_type = other DNA
tacatctatactttcaatagttc

SEQ ID NO: 7582 - DNA, 23 bp, synthetic construct
  source 1..23: mol_type = other DNA
atacatctatactttcaatagtt

SEQ ID NO: 7583 - DNA, 23 bp, synthetic construct
  source 1..23: mol_type = other DNA
catacatctatactttcaatagt

SEQ ID NO: 7584 - DNA, 23 bp, synthetic construct
  source 1..23: mol_type = other DNA
ccatacatctatactttcaatag

SEQ ID NO: 7585 - DNA, 23 bp, synthetic construct
  source 1..23: mol_type = other DNA
tccatacatctatactttcaata

SEQ ID NO: 7586 - DNA, 23 bp, synthetic construct
  source 1..23: mol_type = other DNA
atccatacatctatactttcaat

SEQ ID NO: 7587 - DNA, 23 bp, synthetic construct
  source 1..23: mol_type = other DNA
catccatacatctatactttcaa

SEQ ID NO: 7588 - DNA, 23 bp, synthetic construct
  source 1..23: mol_type = other DNA
ccatccatacatctatactttca

SEQ ID NO: 7589 - DNA, 23 bp, synthetic construct
  source 1..23: mol_type = other DNA
cccatccatacatctatactttc

SEQ ID NO: 7590 - DNA, 23 bp, synthetic construct
  source 1..23: mol_type = other DNA
acccatccatacatctatacttt

SEQ ID NO: 7591 - DNA, 23 bp, synthetic construct
  source 1..23: mol_type = other DNA
cacccatccatacatctatactt

SEQ ID NO: 7592 - DNA, 23 bp, synthetic construct
  source 1..23: mol_type = other DNA
tcacccatccatacatctatact

SEQ ID NO: 7593 - DNA, 23 bp, synthetic construct
  source 1..23: mol_type = other DNA
ttcacccatccatacatctatac

SEQ ID NO: 7594 - DNA, 23 bp, synthetic construct
  source 1..23: mol_type = other DNA
attcacccatccatacatctata

SEQ ID NO: 7595 - DNA, 23 bp, synthetic construct
  source 1..23: mol_type = other DNA
aattcacccatccatacatctat

SEQ ID NO: 7596 - DNA, 23 bp, synthetic construct
  source 1..23: mol_type = other DNA
aaattcacccatccatacatcta

SEQ ID NO: 7597 - DNA, 23 bp, synthetic construct
  source 1..23: mol_type = other DNA
caaattcacccatccatacatct

SEQ ID NO: 7598 - DNA, 23 bp, synthetic construct
  source 1..23: mol_type = other DNA
ccaaattcacccatccatacatc

SEQ ID NO: 7599 - DNA, 23 bp, synthetic construct
  source 1..23: mol_type = other DNA
cccaaattcacccatccatacat

SEQ ID NO: 7600 - DNA, 23 bp, synthetic construct
  source 1..23: mol_type = other DNA
ccccaaattcacccatccataca

SEQ ID NO: 7601 - DNA, 23 bp, synthetic construct
  source 1..23: mol_type = other DNA
cccccaaattcacccatccatac

SEQ ID NO: 7602 - DNA, 23 bp, synthetic construct
  source 1..23: mol_type = other DNA
acccccaaattcacccatccata

SEQ ID NO: 7603 - DNA, 23 bp, synthetic construct
  source 1..23: mol_type = other DNA
tacccccaaattcacccatccat

SEQ ID NO: 7604 - DNA, 23 bp, synthetic construct
  source 1..23: mol_type = other DNA
ttacccccaaattcacccatcca

SEQ ID NO: 7605 - DNA, 23 bp, synthetic construct
  source 1..23: mol_type = other DNA
attacccccaaattcacccatcc

SEQ ID NO: 7606 - DNA, 23 bp, synthetic construct
  source 1..23: mol_type = other DNA
aattacccccaaattcacccatc

SEQ ID NO: 7607 - DNA, 23 bp, synthetic construct
  source 1..23: mol_type = other DNA
caattacccccaaattcacccat

SEQ ID NO: 7608 - DNA, 23 bp, synthetic construct
  source 1..23: mol_type = other DNA
acaattacccccaaattcaccca

SEQ ID NO: 7609 - DNA, 23 bp, synthetic construct
  source 1..23: mol_type = other DNA
aacaattacccccaaattcaccc

SEQ ID NO: 7610 - DNA, 23 bp, synthetic construct
  source 1..23: mol_type = other DNA
taacaattacccccaaattcacc

SEQ ID NO: 7611 - DNA, 23 bp, synthetic construct
  source 1..23: mol_type = other DNA
ctaacaattacccccaaattcac

SEQ ID NO: 7612 - DNA, 23 bp, synthetic construct
  source 1..23: mol_type = other DNA
tctaacaattacccccaaattca

SEQ ID NO: 7613 - DNA, 23 bp, synthetic construct
  source 1..23: mol_type = other DNA
atctaacaattacccccaaattc

SEQ ID NO: 7614 - DNA, 23 bp, synthetic construct
  source 1..23: mol_type = other DNA
catctaacaattacccccaaatt

SEQ ID NO: 7615 - DNA, 23 bp, synthetic construct
  source 1..23: mol_type = other DNA
tcatctaacaattacccccaaat

SEQ ID NO: 7616 - DNA, 23 bp, synthetic construct
  source 1..23: mol_type = other DNA
atcatctaacaattacccccaaa

SEQ ID NO: 7617 - DNA, 23 bp, synthetic construct
  source 1..23: mol_type = other DNA
catcatctaacaattacccccaa

SEQ ID NO: 7618 - DNA, 23 bp, synthetic construct
  source 1..23: mol_type = other DNA
ccatcatctaacaattaccccca

SEQ ID NO: 7619 - DNA, 23 bp, synthetic construct
  source 1..23: mol_type = other DNA
tccatcatctaacaattaccccc

SEQ ID NO: 7620 - DNA, 23 bp, synthetic construct
  source 1..23: mol_type = other DNA
atccatcatctaacaattacccc

SEQ ID NO: 7621 - DNA, 23 bp, synthetic construct
  source 1..23: mol_type = other DNA
catccatcatctaacaattaccc

SEQ ID NO: 7622 - DNA, 23 bp, synthetic construct
  source 1..23: mol_type = other DNA
tcatccatcatctaacaattacc

SEQ ID NO: 7623 - DNA, 23 bp, synthetic construct
  source 1..23: mol_type = other DNA
ctcatccatcatctaacaattac

SEQ ID NO: 7624 - DNA, 23 bp, synthetic construct
  source 1..23: mol_type = other DNA
actcatccatcatctaacaatta

SEQ ID NO: 7625 - DNA, 23 bp, synthetic construct
  source 1..23: mol_type = other DNA
tactcatccatcatctaacaatt

SEQ ID NO: 7626 - DNA, 23 bp, synthetic construct
  source 1..23: mol_type = other DNA
atactcatccatcatctaacaat

SEQ ID NO: 7627 - DNA, 23 bp, synthetic construct
  source 1..23: mol_type = other DNA
tatactcatccatcatctaacaa

SEQ ID NO: 7628 - DNA, 23 bp, synthetic construct
  source 1..23: mol_type = other DNA
ctatactcatccatcatctaaca

SEQ ID NO: 7629 - DNA, 23 bp, synthetic construct
  source 1..23: mol_type = other DNA
tctatactcatccatcatctaac

SEQ ID NO: 7630 - DNA, 23 bp, synthetic construct
  source 1..23: mol_type = other DNA
atctatactcatccatcatctaa

SEQ ID NO: 7631 - DNA, 23 bp, synthetic construct
  source 1..23: mol_type = other DNA
catctatactcatccatcatcta

SEQ ID NO: 7632 - DNA, 23 bp, synthetic construct
  source 1..23: mol_type = other DNA
tcatctatactcatccatcatct

SEQ ID NO: 7633 - DNA, 23 bp, synthetic construct
  source 1..23: mol_type = other DNA
ttcatctatactcatccatcatc

SEQ ID NO: 7634 - DNA, 23 bp, synthetic construct
  source 1..23: mol_type = other DNA
attcatctatactcatccatcat

SEQ ID NO: 7635 - DNA, 23 bp, synthetic construct
  source 1..23: mol_type = other DNA
cattcatctatactcatccatca

SEQ ID NO: 7636 - DNA, 23 bp, synthetic construct
  source 1..23: mol_type = other DNA
tcattcatctatactcatccatc

SEQ ID NO: 7637 - DNA, 23 bp, synthetic construct
  source 1..23: mol_type = other DNA
atcattcatctatactcatccat

SEQ ID NO: 7638 - DNA, 23 bp, synthetic construct
  source 1..23: mol_type = other DNA
catcattcatctatactcatcca

SEQ ID NO: 7639 - DNA, 23 bp, synthetic construct
  source 1..23: mol_type = other DNA
ccatcattcatctatactcatcc

SEQ ID NO: 7640 - DNA, 23 bp, synthetic construct
  source 1..23: mol_type = other DNA
tccatcattcatctatactcatc

SEQ ID NO: 7641 - DNA, 23 bp, synthetic construct
  source 1..23: mol_type = other DNA
atccatcattcatctatactcat

SEQ ID NO: 7642 - DNA, 23 bp, synthetic construct
  source 1..23: mol_type = other DNA
catccatcattcatctatactca

SEQ ID NO: 7643 - DNA, 23 bp, synthetic construct
  source 1..23: mol_type = other DNA
ccatccatcattcatctatactc

SEQ ID NO: 7644 - DNA, 23 bp, synthetic construct
  source 1..23: mol_type = other DNA
tccatccatcattcatctatact

SEQ ID NO: 7645 - DNA, 23 bp, synthetic construct
  source 1..23: mol_type = other DNA
atccatccatcattcatctatac

SEQ ID NO: 7646 - DNA, 23 bp, synthetic construct
  source 1..23: mol_type = other DNA
tatccatccatcattcatctata

SEQ ID NO: 7647 - DNA, 23 bp, synthetic construct
  source 1..23: mol_type = other DNA
ttatccatccatcattcatctat

SEQ ID NO: 7648 - DNA, 23 bp, synthetic construct
  source 1..23: mol_type = other DNA
gttatccatccatcattcatcta

SEQ ID NO: 7649 - DNA, 23 bp, synthetic construct
  source 1..23: mol_type = other DNA
agttatccatccatcattcatct

SEQ ID NO: 7650 - DNA, 23 bp, synthetic construct
  source 1..23: mol_type = other DNA
aagttatccatccatcattcatc

SEQ ID NO: 7651 - DNA, 23 bp, synthetic construct
  source 1..23: mol_type = other DNA
caagttatccatccatcattcat

SEQ ID NO: 7652 - DNA, 23 bp, synthetic construct
  source 1..23: mol_type = other DNA
tcaagttatccatccatcattca

SEQ ID NO: 7653 - DNA, 23 bp, synthetic construct
  source 1..23: mol_type = other DNA
atcaagttatccatccatcattc

SEQ ID NO: 7654 - DNA, 23 bp, synthetic construct
  source 1..23: mol_type = other DNA
catcaagttatccatccatcatt

SEQ ID NO: 7655 - DNA, 23 bp, synthetic construct
  source 1..23: mol_type = other DNA
tcatcaagttatccatccatcat

SEQ ID NO: 7656 - DNA, 23 bp, synthetic construct
  source 1..23: mol_type = other DNA
ctcatcaagttatccatccatca

SEQ ID NO: 7657 - DNA, 23 bp, synthetic construct
  source 1..23: mol_type = other DNA
actcatcaagttatccatccatc

SEQ ID NO: 7658 - DNA, 23 bp, synthetic construct
  source 1..23: mol_type = other DNA
cactcatcaagttatccatccat

SEQ ID NO: 7659 - DNA, 23 bp, synthetic construct
  source 1..23: mol_type = other DNA
ccactcatcaagttatccatcca

SEQ ID NO: 7660 - DNA, 23 bp, synthetic construct
  source 1..23: mol_type = other DNA
tccactcatcaagttatccatcc

SEQ ID NO: 7661 - DNA, 23 bp, synthetic construct
  source 1..23: mol_type = other DNA
atccactcatcaagttatccatc

SEQ ID NO: 7662 - DNA, 23 bp, synthetic construct
  source 1..23: mol_type = other DNA
tatccactcatcaagttatccat

SEQ ID NO: 7663 - DNA, 23 bp, synthetic construct
  source 1..23: mol_type = other DNA
ctatccactcatcaagttatcca

SEQ ID NO: 7664 - DNA, 23 bp, synthetic construct
  source 1..23: mol_type = other DNA
tctatccactcatcaagttatcc

SEQ ID NO: 7665 - DNA, 23 bp, synthetic construct
  source 1..23: mol_type = other DNA
atctatccactcatcaagttatc

SEQ ID NO: 7666 - DNA, 23 bp, synthetic construct
  source 1..23: mol_type = other DNA
tatctatccactcatcaagttat

SEQ ID NO: 7667 - DNA, 23 bp, synthetic construct
  source 1..23: mol_type = other DNA
ctatctatccactcatcaagtta

SEQ ID NO: 7668 - DNA, 23 bp, synthetic construct
  source 1..23: mol_type = other DNA
tctatctatccactcatcaagtt

SEQ ID NO: 7669 - DNA, 23 bp, synthetic construct
  source 1..23: mol_type = other DNA
atctatctatccactcatcaagt

SEQ ID NO: 7670 - DNA, 23 bp, synthetic construct
  source 1..23: mol_type = other DNA
aatctatctatccactcatcaag

SEQ ID NO: 7671 - DNA, 23 bp, synthetic construct
  source 1..23: mol_type = other DNA
caatctatctatccactcatcaa

SEQ ID NO: 7672 - DNA, 23 bp, synthetic construct
  source 1..23: mol_type = other DNA
gcaatctatctatccactcatca

SEQ ID NO: 7673 - DNA, 23 bp, synthetic construct
  source 1..23: mol_type = other DNA
agcaatctatctatccactcatc

SEQ ID NO: 7674 - DNA, 23 bp, synthetic construct
  source 1..23: mol_type = other DNA
cagcaatctatctatccactcat

SEQ ID NO: 7675 - DNA, 23 bp, synthetic construct
  source 1..23: mol_type = other DNA
ccagcaatctatctatccactca

SEQ ID NO: 7676 - DNA, 23 bp, synthetic construct
  source 1..23: mol_type = other DNA
tccagcaatctatctatccactc

SEQ ID NO: 7677 - DNA, 23 bp, synthetic construct
  source 1..23: mol_type = other DNA
atccagcaatctatctatccact

SEQ ID NO: 7678 - DNA, 23 bp, synthetic construct
  source 1..23: mol_type = other DNA
tatccagcaatctatctatccac

SEQ ID NO: 7679 - DNA, 23 bp, synthetic construct
  source 1..23: mol_type = other DNA
ctatccagcaatctatctatcca

SEQ ID NO: 7680 - DNA, 23 bp, synthetic construct
  source 1..23: mol_type = other DNA
tctatccagcaatctatctatcc

SEQ ID NO: 7681 - DNA, 23 bp, synthetic construct
  source 1..23: mol_type = other DNA
atctatccagcaatctatctatc

SEQ ID NO: 7682 - DNA, 23 bp, synthetic construct
  source 1..23: mol_type = other DNA
catctatccagcaatctatctat

SEQ ID NO: 7683 - DNA, 23 bp, synthetic construct
  source 1..23: mol_type = other DNA
tcatctatccagcaatctatcta

SEQ ID NO: 7684 - DNA, 23 bp, synthetic construct
  source 1..23: mol_type = other DNA
atcatctatccagcaatctatct

SEQ ID NO: 7685 - DNA, 23 bp, synthetic construct
  source 1..23: mol_type = other DNA
aatcatctatccagcaatctatc

SEQ ID NO: 7686 - DNA, 23 bp, synthetic construct
  source 1..23: mol_type = other DNA
caatcatctatccagcaatctat

SEQ ID NO: 7687 - DNA, 23 bp, synthetic construct
  source 1..23: mol_type = other DNA
tcaatcatctatccagcaatcta

SEQ ID NO: 7688 - DNA, 23 bp, synthetic construct
  source 1..23: mol_type = other DNA
gtcaatcatctatccagcaatct

SEQ ID NO: 7689 - DNA, 23 bp, synthetic construct
  source 1..23: mol_type = other DNA
agtcaatcatctatccagcaatc

SEQ ID NO: 7690 - DNA, 23 bp, synthetic construct
  source 1..23: mol_type = other DNA
cagtcaatcatctatccagcaat

SEQ ID NO: 7691 - DNA, 23 bp, synthetic construct
  source 1..23: mol_type = other DNA
ccagtcaatcatctatccagcaa

SEQ ID NO: 7692 - DNA, 23 bp, synthetic construct
  source 1..23: mol_type = other DNA
cccagtcaatcatctatccagca

SEQ ID NO: 7693 - DNA, 23 bp, synthetic construct
  source 1..23: mol_type = other DNA
acccagtcaatcatctatccagc

SEQ ID NO: 7694 - DNA, 23 bp, synthetic construct
  source 1..23: mol_type = other DNA
cacccagtcaatcatctatccag

SEQ ID NO: 7695 - DNA, 23 bp, synthetic construct
  source 1..23: mol_type = other DNA
ccacccagtcaatcatctatcca

SEQ ID NO: 7696 - DNA, 23 bp, synthetic construct
  source 1..23: mol_type = other DNA
tccacccagtcaatcatctatcc

SEQ ID NO: 7697 - DNA, 23 bp, synthetic construct
  source 1..23: mol_type = other DNA
atccacccagtcaatcatctatc

SEQ ID NO: 7698 - DNA, 23 bp, synthetic construct
  source 1..23: mol_type = other DNA
tatccacccagtcaatcatctat

SEQ ID NO: 7699 - DNA, 23 bp, synthetic construct
  source 1..23: mol_type = other DNA
ctatccacccagtcaatcatcta

SEQ ID NO: 7700 - DNA, 23 bp, synthetic construct
  source 1..23: mol_type = other DNA
tctatccacccagtcaatcatct

SEQ ID NO: 7701 - DNA, 23 bp, synthetic construct
  source 1..23: mol_type = other DNA
atctatccacccagtcaatcatc

SEQ ID NO: 7702 - DNA, 23 bp, synthetic construct
  source 1..23: mol_type = other DNA
catctatccacccagtcaatcat

SEQ ID NO: 7703 - DNA, 23 bp, synthetic construct
  source 1..23: mol_type = other DNA
tcatctatccacccagtcaatca

SEQ ID NO: 7704 - DNA, 23 bp, synthetic construct
  source 1..23: mol_type = other DNA
ttcatctatccacccagtcaatc

SEQ ID NO: 7705 - DNA, 23 bp, synthetic construct
  source 1..23: mol_type = other DNA
tttcatctatccacccagtcaat

SEQ ID NO: 7706 - DNA, 23 bp, synthetic construct
  source 1..23: mol_type = other DNA
atttcatctatccacccagtcaa

SEQ ID NO: 7707 - DNA, 23 bp, synthetic construct
  source 1..23: mol_type = other DNA
catttcatctatccacccagtca

SEQ ID NO: 7708 - DNA, 23 bp, synthetic construct
  source 1..23: mol_type = other DNA
acatttcatctatccacccagtc

SEQ ID NO: 7709 - DNA, 23 bp, synthetic construct
  source 1..23: mol_type = other DNA
aacatttcatctatccacccagt

SEQ ID NO: 7710 - DNA, 23 bp, synthetic construct
  source 1..23: mol_type = other DNA
caacatttcatctatccacccag

SEQ ID NO: 7711 - DNA, 23 bp, synthetic construct
  source 1..23: mol_type = other DNA
ccaacatttcatctatccaccca

SEQ ID NO: 7712 - DNA, 23 bp, synthetic construct
  source 1..23: mol_type = other DNA
tccaacatttcatctatccaccc

SEQ ID NO: 7713 - DNA, 23 bp, synthetic construct
  source 1..23: mol_type = other DNA
atccaacatttcatctatccacc

SEQ ID NO: 7714 - DNA, 23 bp, synthetic construct
  source 1..23: mol_type = other DNA
catccaacatttcatctatccac

SEQ ID NO: 7715 - DNA, 23 bp, synthetic construct
  source 1..23: mol_type = other DNA
tcatccaacatttcatctatcca

SEQ ID NO: 7716 - DNA, 23 bp, synthetic construct
  source 1..23: mol_type = other DNA
ctcatccaacatttcatctatcc

SEQ ID NO: 7717 - DNA, 23 bp, synthetic construct
  source 1..23: mol_type = other DNA
gctcatccaacatttcatctatc

SEQ ID NO: 7718 - DNA, 23 bp, synthetic construct
  source 1..23: mol_type = other DNA
tgctcatccaacatttcatctat

SEQ ID NO: 7719 - DNA, 23 bp, synthetic construct
  source 1..23: mol_type = other DNA
ctgctcatccaacatttcatcta

SEQ ID NO: 7720 - DNA, 23 bp, synthetic construct
  source 1..23: mol_type = other DNA
tctgctcatccaacatttcatct

SEQ ID NO: 7721 - DNA, 23 bp, synthetic construct
  source 1..23: mol_type = other DNA
atctgctcatccaacatttcatc

SEQ ID NO: 7722 - DNA, 23 bp, synthetic construct
  source 1..23: mol_type = other DNA
aatctgctcatccaacatttcat

SEQ ID NO: 7723 - DNA, 23 bp, synthetic construct
  source 1..23: mol_type = other DNA
taatctgctcatccaacatttca

SEQ ID NO: 7724 - DNA, 23 bp, synthetic construct
  source 1..23: mol_type = other DNA
ttaatctgctcatccaacatttc

SEQ ID NO: 7725 - DNA, 23 bp, synthetic construct
  source 1..23: mol_type = other DNA
cttaatctgctcatccaacattt

SEQ ID NO: 7726 - DNA, 23 bp, synthetic construct
  source 1..23: mol_type = other DNA
acttaatctgctcatccaacatt

SEQ ID NO: 7727 - DNA, 23 bp, synthetic construct
  source 1..23: mol_type = other DNA
aacttaatctgctcatccaacat

SEQ ID NO: 7728 - DNA, 23 bp, synthetic construct
  source 1..23: mol_type = other DNA
caacttaatctgctcatccaaca

SEQ ID NO: 7729 - DNA, 23 bp, synthetic construct
  source 1..23: mol_type = other DNA
acaacttaatctgctcatccaac

SEQ ID NO: 7730 - DNA, 23 bp, synthetic construct
  source 1..23: mol_type = other DNA
tacaacttaatctgctcatccaa

SEQ ID NO: 7731 - DNA, 23 bp, synthetic construct
  source 1..23: mol_type = other DNA
atacaacttaatctgctcatcca

SEQ ID NO: 7732 - DNA, 23 bp, synthetic construct
  source 1..23: mol_type = other DNA
aatacaacttaatctgctcatcc

SEQ ID NO: 7733 - DNA, 23 bp, synthetic construct
  source 1..23: mol_type = other DNA
caatacaacttaatctgctcatc

SEQ ID NO: 7734 - DNA, 23 bp, synthetic construct
  source 1..23: mol_type = other DNA
ccaatacaacttaatctgctcat

SEQ ID NO: 7735 - DNA, 23 bp, synthetic construct
  source 1..23: mol_type = other DNA
tccaatacaacttaatctgctca

SEQ ID NO: 7736 - DNA, 23 bp, synthetic construct
  source 1..23: mol_type = other DNA
atccaatacaacttaatctgctc

SEQ ID NO: 7737 - DNA, 23 bp, synthetic construct
  source 1..23: mol_type = other DNA
catccaatacaacttaatctgct

SEQ ID NO: 7738 - DNA, 23 bp, synthetic construct
  source 1..23: mol_type = other DNA
ccatccaatacaacttaatctgc

SEQ ID NO: 7739 - DNA, 23 bp, synthetic construct
  source 1..23: mol_type = other DNA
cccatccaatacaacttaatctg

SEQ ID NO: 7740 - DNA, 23 bp, synthetic construct
  source 1..23: mol_type = other DNA
tcccatccaatacaacttaatct

SEQ ID NO: 7741 - DNA, 23 bp, synthetic construct
  source 1..23: mol_type = other DNA
atcccatccaatacaacttaatc

SEQ ID NO: 7742 - DNA, 23 bp, synthetic construct
  source 1..23: mol_type = other DNA
catcccatccaatacaacttaat

SEQ ID NO: 7743 - DNA, 23 bp, synthetic construct
  source 1..23: mol_type = other DNA
ccatcccatccaatacaacttaa

SEQ ID NO: 7744 - DNA, 23 bp, synthetic construct
  source 1..23: mol_type = other DNA
tccatcccatccaatacaactta

SEQ ID NO: 7745 - DNA, 23 bp, synthetic construct
  source 1..23: mol_type = other DNA
atccatcccatccaatacaactt

SEQ ID NO: 7746 - DNA, 23 bp, synthetic construct
  source 1..23: mol_type = other DNA
catccatcccatccaatacaact

SEQ ID NO: 7747 - DNA, 23 bp, synthetic construct
  source 1..23: mol_type = other DNA
ccatccatcccatccaatacaac

SEQ ID NO: 7748 - DNA, 23 bp, synthetic construct
  source 1..23: mol_type = other DNA
tccatccatcccatccaatacaa

SEQ ID NO: 7749 - DNA, 23 bp, synthetic construct
  source 1..23: mol_type = other DNA
ttccatccatcccatccaataca

SEQ ID NO: 7750 - DNA, 23 bp, synthetic construct
  source 1..23: mol_type = other DNA
cttccatccatcccatccaatac

SEQ ID NO: 7751 - DNA, 23 bp, synthetic construct
  source 1..23: mol_type = other DNA
acttccatccatcccatccaata

SEQ ID NO: 7752 - DNA, 23 bp, synthetic construct
  source 1..23: mol_type = other DNA
cacttccatccatcccatccaat

SEQ ID NO: 7753 - DNA, 23 bp, synthetic construct
  source 1..23: mol_type = other DNA
acacttccatccatcccatccaa

SEQ ID NO: 7754 - DNA, 23 bp, synthetic construct
  source 1..23: mol_type = other DNA
cacacttccatccatcccatcca

SEQ ID NO: 7755 - DNA, 23 bp, synthetic construct
  source 1..23: mol_type = other DNA
ccacacttccatccatcccatcc

SEQ ID NO: 7756 - DNA, 23 bp, synthetic construct
  source 1..23: mol_type = other DNA
accacacttccatccatcccatc

SEQ ID NO: 7757 - DNA, 23 bp, synthetic construct
  source 1..23: mol_type = other DNA
aaccacacttccatccatcccat

SEQ ID NO: 7758 - DNA, 23 bp, synthetic construct
  source 1..23: mol_type = other DNA
caaccacacttccatccatccca

SEQ ID NO: 7759 - DNA, 23 bp, synthetic construct
  source 1..23: mol_type = other DNA
tcaaccacacttccatccatccc

SEQ ID NO: 7760 - DNA, 23 bp, synthetic construct
  source 1..23: mol_type = other DNA
ctcaaccacacttccatccatcc

SEQ ID NO: 7761 - DNA, 23 bp, synthetic construct
  source 1..23: mol_type = other DNA
actcaaccacacttccatccatc

SEQ ID NO: 7762 - DNA, 23 bp, synthetic construct
  source 1..23: mol_type = other DNA
aactcaaccacacttccatccat

SEQ ID NO: 7763 - DNA, 23 bp, synthetic construct
  source 1..23: mol_type = other DNA
taactcaaccacacttccatcca

SEQ ID NO: 7764 - DNA, 23 bp, synthetic construct
  source 1..23: mol_type = other DNA
ataactcaaccacacttccatcc

SEQ ID NO: 7765 - DNA, 23 bp, synthetic construct
  source 1..23: mol_type = other DNA
aataactcaaccacacttccatc

SEQ ID NO: 7766 - DNA, 23 bp, synthetic construct
  source 1..23: mol_type = other DNA
taataactcaaccacacttccat

SEQ ID NO: 7767 - DNA, 23 bp, synthetic construct
  source 1..23: mol_type = other DNA
ctaataactcaaccacacttcca

SEQ ID NO: 7768 - DNA, 23 bp, synthetic construct
  source 1..23: mol_type = other DNA
tctaataactcaaccacacttcc

SEQ ID NO: 7769 - DNA, 23 bp, synthetic construct
  source 1..23: mol_type = other DNA
ttctaataactcaaccacacttc

SEQ ID NO: 7770 - DNA, 23 bp, synthetic construct
  source 1..23: mol_type = other DNA
cttctaataactcaaccacactt

SEQ ID NO: 7771 - DNA, 23 bp, synthetic construct
  source 1..23: mol_type = other DNA
ccttctaataactcaaccacact

SEQ ID NO: 7772 - DNA, 23 bp, synthetic construct
  source 1..23: mol_type = other DNA
tccttctaataactcaaccacac

SEQ ID NO: 7773 - DNA, 23 bp, synthetic construct
  source 1..23: mol_type = other DNA
ttccttctaataactcaaccaca

SEQ ID NO: 7774 - DNA, 23 bp, synthetic construct
  source 1..23: mol_type = other DNA
cttccttctaataactcaaccac

SEQ ID NO: 7775 - DNA, 23 bp, synthetic construct
  source 1..23: mol_type = other DNA
tcttccttctaataactcaacca

SEQ ID NO: 7776 - DNA, 23 bp, synthetic construct
  source 1..23: mol_type = other DNA
atcttccttctaataactcaacc

SEQ ID NO: 7777 - DNA, 23 bp, synthetic construct
  source 1..23: mol_type = other DNA
aatcttccttctaataactcaac

SEQ ID NO: 7778 - DNA, 23 bp, synthetic construct
  source 1..23: mol_type = other DNA
caatcttccttctaataactcaa

SEQ ID NO: 7779 - DNA, 23 bp, synthetic construct
  source 1..23: mol_type = other DNA
tcaatcttccttctaataactca

SEQ ID NO: 7780 - DNA, 23 bp, synthetic construct
  source 1..23: mol_type = other DNA
ctcaatcttccttctaataactc

SEQ ID NO: 7781 - DNA, 23 bp, synthetic construct
  source 1..23: mol_type = other DNA
actcaatcttccttctaataact

SEQ ID NO: 7782 - DNA, 23 bp, synthetic construct
  source 1..23: mol_type = other DNA
tactcaatcttccttctaataac

SEQ ID NO: 7783 - DNA, 23 bp, synthetic construct
  source 1..23: mol_type = other DNA
ctactcaatcttccttctaataa

SEQ ID NO: 7784 - DNA, 23 bp, synthetic construct
  source 1..23: mol_type = other DNA
tctactcaatcttccttctaata

SEQ ID NO: 7785 - DNA, 23 bp, synthetic construct
  source 1..23: mol_type = other DNA
atctactcaatcttccttctaat

SEQ ID NO: 7786 - DNA, 23 bp, synthetic construct
  source 1..23: mol_type = other DNA
tatctactcaatcttccttctaa

SEQ ID NO: 7787 - DNA, 23 bp, synthetic construct
  source 1..23: mol_type = other DNA
ctatctactcaatcttccttcta

SEQ ID NO: 7788 - DNA, 23 bp, synthetic construct
  source 1..23: mol_type = other DNA
cctatctactcaatcttccttct

SEQ ID NO: 7789 - DNA, 23 bp, synthetic construct
  source 1..23: mol_type = other DNA
acctatctactcaatcttccttc

SEQ ID NO: 7790 - DNA, 23 bp, synthetic construct
  source 1..23: mol_type = other DNA
cacctatctactcaatcttcctt

SEQ ID NO: 7791 - DNA, 23 bp, synthetic construct
  source 1..23: mol_type = other DNA
tcacctatctactcaatcttcct

SEQ ID NO: 7792 - DNA, 23 bp, synthetic construct
  source 1..23: mol_type = other DNA
ttcacctatctactcaatcttcc

SEQ ID NO: 7793 - DNA, 23 bp, synthetic construct
  source 1..23: mol_type = other DNA
attcacctatctactcaatcttc

SEQ ID NO: 7794 - DNA, 23 bp, synthetic construct
  source 1..23: mol_type = other DNA
aattcacctatctactcaatctt

SEQ ID NO: 7795 - DNA, 23 bp, synthetic construct
  source 1..23: mol_type = other DNA
aaattcacctatctactcaatct

SEQ ID NO: 7796 - DNA, 23 bp, synthetic construct
  source 1..23: mol_type = other DNA
caaattcacctatctactcaatc

SEQ ID NO: 7797 - DNA, 23 bp, synthetic construct
  source 1..23: mol_type = other DNA
acaaattcacctatctactcaat

SEQ ID NO: 7798 - DNA, 23 bp, synthetic construct
  source 1..23: mol_type = other DNA
aacaaattcacctatctactcaa

SEQ ID NO: 7799 - DNA, 23 bp, synthetic construct
  source 1..23: mol_type = other DNA
caacaaattcacctatctactca

SEQ ID NO: 7800 - DNA, 23 bp, synthetic construct
  source 1..23: mol_type = other DNA
tcaacaaattcacctatctactc

SEQ ID NO: 7801 - DNA, 23 bp, synthetic construct
  source 1..23: mol_type = other DNA
atcaacaaattcacctatctact

SEQ ID NO: 7802 - DNA, 23 bp, synthetic construct
  source 1..23: mol_type = other DNA
tatcaacaaattcacctatctac

SEQ ID NO: 7803 - DNA, 23 bp, synthetic construct
  source 1..23: mol_type = other DNA
ctatcaacaaattcacctatcta

SEQ ID NO: 7804 - DNA, 23 bp, synthetic construct
  source 1..23: mol_type = other DNA
actatcaacaaattcacctatct

SEQ ID NO: 7805 - DNA, 23 bp, synthetic construct
  source 1..23: mol_type = other DNA
gactatcaacaaattcacctatc

SEQ ID NO: 7806 - DNA, 23 bp, synthetic construct
  source 1..23: mol_type = other DNA
tgactatcaacaaattcacctat

SEQ ID NO: 7807 - DNA, 23 bp, synthetic construct
  source 1..23: mol_type = other DNA
ctgactatcaacaaattcaccta

SEQ ID NO: 7808 - DNA, 23 bp, synthetic construct
  source 1..23: mol_type = other DNA
tctgactatcaacaaattcacct

SEQ ID NO: 7809 - DNA, 23 bp, synthetic construct
  source 1..23: mol_type = other DNA
atctgactatcaacaaattcacc

SEQ ID NO: 7810 - DNA, 23 bp, synthetic construct
  source 1..23: mol_type = other DNA
catctgactatcaacaaattcac

SEQ ID NO: 7811 - DNA, 23 bp, synthetic construct
  source 1..23: mol_type = other DNA
ccatctgactatcaacaaattca

SEQ ID NO: 7812 - DNA, 23 bp, synthetic construct
  source 1..23: mol_type = other DNA
cccatctgactatcaacaaattc

SEQ ID NO: 7813 - DNA, 23 bp, synthetic construct
  source 1..23: mol_type = other DNA
acccatctgactatcaacaaatt

SEQ ID NO: 7814 - DNA, 23 bp, synthetic construct
  source 1..23: mol_type = other DNA
tacccatctgactatcaacaaat

SEQ ID NO: 7815 - DNA, 23 bp, synthetic construct
  source 1..23: mol_type = other DNA
ctacccatctgactatcaacaaa

SEQ ID NO: 7816 - DNA, 23 bp, synthetic construct
  source 1..23: mol_type = other DNA
tctacccatctgactatcaacaa

SEQ ID NO: 7817 - DNA, 23 bp, synthetic construct
  source 1..23: mol_type = other DNA
atctacccatctgactatcaaca

SEQ ID NO: 7818 - DNA, 23 bp, synthetic construct
  source 1..23: mol_type = other DNA
tatctacccatctgactatcaac

SEQ ID NO: 7819 - DNA, 23 bp, synthetic construct
  source 1..23: mol_type = other DNA
ctatctacccatctgactatcaa

SEQ ID NO: 7820 - DNA, 23 bp, synthetic construct
  source 1..23: mol_type = other DNA
cctatctacccatctgactatca

SEQ ID NO: 7821 - DNA, 23 bp, synthetic construct
  source 1..23: mol_type = other DNA
acctatctacccatctgactatc

SEQ ID NO: 7822 - DNA, 23 bp, synthetic construct
  source 1..23: mol_type = other DNA
tacctatctacccatctgactat

SEQ ID NO: 7823 - DNA, 23 bp, synthetic construct
  source 1..23: mol_type = other DNA
ctacctatctacccatctgacta

SEQ ID NO: 7824 - DNA, 23 bp, synthetic construct
  source 1..23: mol_type = other DNA
tctacctatctacccatctgact

SEQ ID NO: 7825 - DNA, 23 bp, synthetic construct
  source 1..23: mol_type = other DNA
atctacctatctacccatctgac

SEQ ID NO: 7826 - DNA, 23 bp, synthetic construct
  source 1..23: mol_type = other DNA
catctacctatctacccatctga

SEQ ID NO: 7827 - DNA, 23 bp, synthetic construct
  source 1..23: mol_type = other DNA
ccatctacctatctacccatctg

SEQ ID NO: 7828 - DNA, 23 bp, synthetic construct
  source 1..23: mol_type = other DNA
tccatctacctatctacccatct

SEQ ID NO: 7829 - DNA, 23 bp, synthetic construct
  source 1..23: mol_type = other DNA
atccatctacctatctacccatc

SEQ ID NO: 7830 - DNA, 23 bp, synthetic construct
  source 1..23: mol_type = other DNA
catccatctacctatctacccat

SEQ ID NO: 7831 - DNA, 23 bp, synthetic construct
  source 1..23: mol_type = other DNA
ccatccatctacctatctaccca

SEQ ID NO: 7832 - DNA, 23 bp, synthetic construct
  source 1..23: mol_type = other DNA
tccatccatctacctatctaccc

SEQ ID NO: 7833 - DNA, 23 bp, synthetic construct
  source 1..23: mol_type = other DNA
atccatccatctacctatctacc

SEQ ID NO: 7834 - DNA, 23 bp, synthetic construct
  source 1..23: mol_type = other DNA
catccatccatctacctatctac

SEQ ID NO: 7835 - DNA, 23 bp, synthetic construct
  source 1..23: mol_type = other DNA
ccatccatccatctacctatcta

SEQ ID NO: 7836 - DNA, 23 bp, synthetic construct
  source 1..23: mol_type = other DNA
tccatccatccatctacctatct

SEQ ID NO: 7837 - DNA, 23 bp, synthetic construct
  source 1..23: mol_type = other DNA
atccatccatccatctacctatc

SEQ ID NO: 7838 - DNA, 23 bp, synthetic construct
  source 1..23: mol_type = other DNA
catccatccatccatctacctat

SEQ ID NO: 7839 - DNA, 23 bp, synthetic construct
  source 1..23: mol_type = other DNA
ccatccatccatccatctaccta

SEQ ID NO: 7840 - DNA, 23 bp, synthetic construct
  source 1..23: mol_type = other DNA
tccatccatccatccatctacct

SEQ ID NO: 7841 - DNA, 23 bp, synthetic construct
  source 1..23: mol_type = other DNA
atccatccatccatccatctacc

SEQ ID NO: 7842 - DNA, 23 bp, synthetic construct
  source 1..23: mol_type = other DNA
catccatccatccatccatctac

SEQ ID NO: 7843 - DNA, 23 bp, synthetic construct
  source 1..23: mol_type = other DNA
ccatccatccatccatccatcta

SEQ ID NO: 7844 - DNA, 23 bp, synthetic construct
  source 1..23: mol_type = other DNA
tccatccatccatccatccatct

SEQ ID NO: 7845 - DNA, 23 bp, synthetic construct
  source 1..23: mol_type = other DNA
atccatccatccatccatccatc

SEQ ID NO: 7846 - DNA, 23 bp, synthetic construct
  source 1..23: mol_type = other DNA
catccatccatccatccatccat

SEQ ID NO: 7847 - DNA, 23 bp, synthetic construct
  source 1..23: mol_type = other DNA
acatccatccatccatccatcca

SEQ ID NO: 7848 - DNA, 23 bp, synthetic construct
  source 1..23: mol_type = other DNA
tacatccatccatccatccatcc

SEQ ID NO: 7849 - DNA, 23 bp, synthetic construct
  source 1..23: mol_type = other DNA
atacatccatccatccatccatc

SEQ ID NO: 7850 - DNA, 23 bp, synthetic construct
  source 1..23: mol_type = other DNA
tatacatccatccatccatccat

SEQ ID NO: 7851 - DNA, 23 bp, synthetic construct
  source 1..23: mol_type = other DNA
ctatacatccatccatccatcca

SEQ ID NO: 7852 - DNA, 23 bp, synthetic construct
  source 1..23: mol_type = other DNA
cctatacatccatccatccatcc

SEQ ID NO: 7853 - DNA, 23 bp, synthetic construct
  source 1..23: mol_type = other DNA
gcctatacatccatccatccatc

SEQ ID NO: 7854 - DNA, 23 bp, synthetic construct
  source 1..23: mol_type = other DNA
tgcctatacatccatccatccat

SEQ ID NO: 7855 - DNA, 23 bp, synthetic construct
  source 1..23: mol_type = other DNA
ctgcctatacatccatccatcca

SEQ ID NO: 7856 - DNA, 23 bp, synthetic construct
  source 1..23: mol_type = other DNA
tctgcctatacatccatccatcc

SEQ ID NO: 7857 - DNA, 23 bp, synthetic construct
  source 1..23: mol_type = other DNA
atctgcctatacatccatccatc

SEQ ID NO: 7858 - DNA, 23 bp, synthetic construct
  source 1..23: mol_type = other DNA
catctgcctatacatccatccat

SEQ ID NO: 7859 - DNA, 23 bp, synthetic construct
  source 1..23: mol_type = other DNA
ccatctgcctatacatccatcca

SEQ ID NO: 7860 - DNA, 23 bp, synthetic construct
  source 1..23: mol_type = other DNA
tccatctgcctatacatccatcc

SEQ ID NO: 7861 - DNA, 23 bp, synthetic construct
  source 1..23: mol_type = other DNA
gtccatctgcctatacatccatc

SEQ ID NO: 7862 - DNA, 23 bp, synthetic construct
  source 1..23: mol_type = other DNA
tgtccatctgcctatacatccat

SEQ ID NO: 7863 - DNA, 23 bp, synthetic construct
  source 1..23: mol_type = other DNA
ttgtccatctgcctatacatcca

SEQ ID NO: 7864 - DNA, 23 bp, synthetic construct
  source 1..23: mol_type = other DNA
tttgtccatctgcctatacatcc

SEQ ID NO: 7865 - DNA, 23 bp, synthetic construct
  source 1..23: mol_type = other DNA
atttgtccatctgcctatacatc

SEQ ID NO: 7866 - DNA, 23 bp, synthetic construct
  source 1..23: mol_type = other DNA
catttgtccatctgcctatacat

SEQ ID NO: 7867 - DNA, 23 bp, synthetic construct
  source 1..23: mol_type = other DNA
ccatttgtccatctgcctataca

SEQ ID NO: 7868 - DNA, 23 bp, synthetic construct
  source 1..23: mol_type = other DNA
tccatttgtccatctgcctatac

SEQ ID NO: 7869 - DNA, 23 bp, synthetic construct
  source 1..23: mol_type = other DNA
atccatttgtccatctgcctata

SEQ ID NO: 7870 - DNA, 23 bp, synthetic construct
  source 1..23: mol_type = other DNA
catccatttgtccatctgcctat

SEQ ID NO: 7871 - DNA, 23 bp, synthetic construct
  source 1..23: mol_type = other DNA
tcatccatttgtccatctgccta

SEQ ID NO: 7872 - DNA, 23 bp, synthetic construct
  source 1..23: mol_type = other DNA
ttcatccatttgtccatctgcct

SEQ ID NO: 7873 - DNA, 23 bp, synthetic construct
  source 1..23: mol_type = other DNA
attcatccatttgtccatctgcc

SEQ ID NO: 7874 - DNA, 23 bp, synthetic construct
  source 1..23: mol_type = other DNA
cattcatccatttgtccatctgc

SEQ ID NO: 7875 - DNA, 23 bp, synthetic construct
  source 1..23: mol_type = other DNA
ccattcatccatttgtccatctg

SEQ ID NO: 7876 - DNA, 23 bp, synthetic construct
  source 1..23: mol_type = other DNA
cccattcatccatttgtccatct

SEQ ID NO: 7877 - DNA, 23 bp, synthetic construct
  source 1..23: mol_type = other DNA
acccattcatccatttgtccatc

SEQ ID NO: 7878 - DNA, 23 bp, synthetic construct
  source 1..23: mol_type = other DNA
cacccattcatccatttgtccat

SEQ ID NO: 7879 - DNA, 23 bp, synthetic construct
  source 1..23: mol_type = other DNA
ccacccattcatccatttgtcca

SEQ ID NO: 7880 - DNA, 23 bp, synthetic construct
  source 1..23: mol_type = other DNA
cccacccattcatccatttgtcc

SEQ ID NO: 7881 - DNA, 23 bp, synthetic construct
  source 1..23: mol_type = other DNA
acccacccattcatccatttgtc

SEQ ID NO: 7882 - DNA, 23 bp, synthetic construct
  source 1..23: mol_type = other DNA
cacccacccattcatccatttgt

SEQ ID NO: 7883 - DNA, 23 bp, synthetic construct
  source 1..23: mol_type = other DNA
ccacccacccattcatccatttg

SEQ ID NO: 7884 - DNA, 23 bp, synthetic construct
  source 1..23: mol_type = other DNA
tccacccacccattcatccattt

SEQ ID NO: 7885 - DNA, 23 bp, synthetic construct
  source 1..23: mol_type = other DNA
atccacccacccattcatccatt

SEQ ID NO: 7886 - DNA, 23 bp, synthetic construct
  source 1..23: mol_type = other DNA
catccacccacccattcatccat

SEQ ID NO: 7887 - DNA, 23 bp, synthetic construct
  source 1..23: mol_type = other DNA
tcatccacccacccattcatcca

SEQ ID NO: 7888 - DNA, 23 bp, synthetic construct
  source 1..23: mol_type = other DNA
ttcatccacccacccattcatcc

SEQ ID NO: 7889 - DNA, 23 bp, synthetic construct
  source 1..23: mol_type = other DNA
attcatccacccacccattcatc

SEQ ID NO: 7890 - DNA, 23 bp, synthetic construct
  source 1..23: mol_type = other DNA
cattcatccacccacccattcat

SEQ ID NO: 7891 - DNA, 23 bp, synthetic construct
  source 1..23: mol_type = other DNA
ccattcatccacccacccattca

SEQ ID NO: 7892 - DNA, 23 bp, synthetic construct
  source 1..23: mol_type = other DNA
tccattcatccacccacccattc

SEQ ID NO: 7893 - DNA, 23 bp, synthetic construct
  source 1..23: mol_type = other DNA
ttccattcatccacccacccatt

SEQ ID NO: 7894 - DNA, 23 bp, synthetic construct
  source 1..23: mol_type = other DNA
cttccattcatccacccacccat

SEQ ID NO: 7895 - DNA, 23 bp, synthetic construct
  source 1..23: mol_type = other DNA
ccttccattcatccacccaccca

SEQ ID NO: 7896 - DNA, 23 bp, synthetic construct
  source 1..23: mol_type = other DNA
tccttccattcatccacccaccc

SEQ ID NO: 7897 - DNA, 23 bp, synthetic construct
  source 1..23: mol_type = other DNA
atccttccattcatccacccacc

SEQ ID NO: 7898 - DNA, 23 bp, synthetic construct
  source 1..23: mol_type = other DNA
catccttccattcatccacccac

SEQ ID NO: 7899 - DNA, 23 bp, synthetic construct
  source 1..23: mol_type = other DNA
acatccttccattcatccaccca

SEQ ID NO: 7900 - DNA, 23 bp, synthetic construct
  source 1..23: mol_type = other DNA
cacatccttccattcatccaccc

SEQ ID NO: 7901 - DNA, 23 bp, synthetic construct
  source 1..23: mol_type = other DNA
acacatccttccattcatccacc

SEQ ID NO: 7902 - DNA, 23 bp, synthetic construct
  source 1..23: mol_type = other DNA
cacacatccttccattcatccac

SEQ ID NO: 7903 - DNA, 23 bp, synthetic construct
  source 1..23: mol_type = other DNA
ccacacatccttccattcatcca

SEQ ID NO: 7904 - DNA, 23 bp, synthetic construct
  source 1..23: mol_type = other DNA
accacacatccttccattcatcc

SEQ ID NO: 7905 - DNA, 23 bp, synthetic construct
  source 1..23: mol_type = other DNA
aaccacacatccttccattcatc

SEQ ID NO: 7906 - DNA, 23 bp, synthetic construct
  source 1..23: mol_type = other DNA
caaccacacatccttccattcat

SEQ ID NO: 7907 - DNA, 23 bp, synthetic construct
  source 1..23: mol_type = other DNA
tcaaccacacatccttccattca

SEQ ID NO: 7908 - DNA, 23 bp, synthetic construct
  source 1..23: mol_type = other DNA
ttcaaccacacatccttccattc

SEQ ID NO: 7909 - DNA, 23 bp, synthetic construct
  source 1..23: mol_type = other DNA
gttcaaccacacatccttccatt

SEQ ID NO: 7910 - DNA, 23 bp, synthetic construct
  source 1..23: mol_type = other DNA
agttcaaccacacatccttccat

SEQ ID NO: 7911 - DNA, 23 bp, synthetic construct
  source 1..23: mol_type = other DNA
tagttcaaccacacatccttcca

SEQ ID NO: 7912 - DNA, 23 bp, synthetic construct
  source 1..23: mol_type = other DNA
atagttcaaccacacatccttcc

SEQ ID NO: 7913 - DNA, 23 bp, synthetic construct
  source 1..23: mol_type = other DNA
aatagttcaaccacacatccttc

SEQ ID NO: 7914 - DNA, 23 bp, synthetic construct
  source 1..23: mol_type = other DNA
caatagttcaaccacacatcctt

SEQ ID NO: 7915 - DNA, 23 bp, synthetic construct
  source 1..23: mol_type = other DNA
gcaatagttcaaccacacatcct

SEQ ID NO: 7916 - DNA, 23 bp, synthetic construct
  source 1..23: mol_type = other DNA
tgcaatagttcaaccacacatcc

SEQ ID NO: 7917 - DNA, 23 bp, synthetic construct
  source 1..23: mol_type = other DNA
ttgcaatagttcaaccacacatc

SEQ ID NO: 7918 - DNA, 23 bp, synthetic construct
  source 1..23: mol_type = other DNA
cttgcaatagttcaaccacacat

SEQ ID NO: 7919 - DNA, 23 bp, synthetic construct
  source 1..23: mol_type = other DNA
acttgcaatagttcaaccacaca

SEQ ID NO: 7920 - DNA, 23 bp, synthetic construct
  source 1..23: mol_type = other DNA
tacttgcaatagttcaaccacac

SEQ ID NO: 7921 - DNA, 23 bp, synthetic construct
  source 1..23: mol_type = other DNA
atacttgcaatagttcaaccaca

SEQ ID NO: 7922 - DNA, 23 bp, synthetic construct
  source 1..23: mol_type = other DNA
aatacttgcaatagttcaaccac

SEQ ID NO: 7923 - DNA, 23 bp, synthetic construct
  source 1..23: mol_type = other DNA
caatacttgcaatagttcaacca

SEQ ID NO: 7924 - DNA, 23 bp, synthetic construct
  source 1..23: mol_type = other DNA
tcaatacttgcaatagttcaacc

SEQ ID NO: 7925 - DNA, 23 bp, synthetic construct
  source 1..23: mol_type = other DNA
atcaatacttgcaatagttcaac

SEQ ID NO: 7926 - DNA, 23 bp, synthetic construct
  source 1..23: mol_type = other DNA
tatcaatacttgcaatagttcaa

SEQ ID NO: 7927 - DNA, 23 bp, synthetic construct
  source 1..23: mol_type = other DNA
ttatcaatacttgcaatagttca

SEQ ID NO: 7928 - DNA, 23 bp, synthetic construct
  source 1..23: mol_type = other DNA
attatcaatacttgcaatagttc

SEQ ID NO: 7929 - DNA, 23 bp, synthetic construct
  source 1..23: mol_type = other DNA
aattatcaatacttgcaatagtt

SEQ ID NO: 7930 - DNA, 23 bp, synthetic construct
  source 1..23: mol_type = other DNA
caattatcaatacttgcaatagt

SEQ ID NO: 7931 - DNA, 23 bp, synthetic construct
  source 1..23: mol_type = other DNA
ccaattatcaatacttgcaatag

SEQ ID NO: 7932 - DNA, 23 bp, synthetic construct
  source 1..23: mol_type = other DNA
cccaattatcaatacttgcaata

SEQ ID NO: 7933 - DNA, 23 bp, synthetic construct
  source 1..23: mol_type = other DNA
acccaattatcaatacttgcaat

SEQ ID NO: 7934 - DNA, 23 bp, synthetic construct
  source 1..23: mol_type = other DNA
aacccaattatcaatacttgcaa

SEQ ID NO: 7935 - DNA, 23 bp, synthetic construct
  source 1..23: mol_type = other DNA
gaacccaattatcaatacttgca

SEQ ID NO: 7936 - DNA, 23 bp, synthetic construct
  source 1..23: mol_type = other DNA
tgaacccaattatcaatacttgc

SEQ ID NO: 7937 - DNA, 23 bp, synthetic construct
  source 1..23: mol_type = other DNA
atgaacccaattatcaatacttg

SEQ ID NO: 7938 - DNA, 23 bp, synthetic construct
  source 1..23: mol_type = other DNA
tatgaacccaattatcaatactt

SEQ ID NO: 7939 - DNA, 23 bp, synthetic construct
  source 1..23: mol_type = other DNA
ttatgaacccaattatcaatact

SEQ ID NO: 7940 - DNA, 23 bp, synthetic construct
  source 1..23: mol_type = other DNA
attatgaacccaattatcaatac

SEQ ID NO: 7941 - DNA, 23 bp, synthetic construct
  source 1..23: mol_type = other DNA
aattatgaacccaattatcaata

SEQ ID NO: 7942 - DNA, 23 bp, synthetic construct
  source 1..23: mol_type = other DNA
aaattatgaacccaattatcaat

SEQ ID NO: 7943 - DNA, 23 bp, synthetic construct
  source 1..23: mol_type = other DNA
gaaattatgaacccaattatcaa

SEQ ID NO: 7944 - DNA, 23 bp, synthetic construct
  source 1..23: mol_type = other DNA
agaaattatgaacccaattatca

SEQ ID NO: 7945 - DNA, 23 bp, synthetic construct
  source 1..23: mol_type = other DNA
cagaaattatgaacccaattatc

SEQ ID NO: 7946 - DNA, 23 bp, synthetic construct
  source 1..23: mol_type = other DNA
tcagaaattatgaacccaattat

SEQ ID NO: 7947 - DNA, 23 bp, synthetic construct
  source 1..23: mol_type = other DNA
ttcagaaattatgaacccaatta

SEQ ID NO: 7948 - DNA, 23 bp, synthetic construct
  source 1..23: mol_type = other DNA
attcagaaattatgaacccaatt

SEQ ID NO: 7949 - DNA, 23 bp, synthetic construct
  source 1..23: mol_type = other DNA
tattcagaaattatgaacccaat

SEQ ID NO: 7950 - DNA, 23 bp, synthetic construct
  source 1..23: mol_type = other DNA
atattcagaaattatgaacccaa

SEQ ID NO: 7951 - DNA, 23 bp, synthetic construct
  source 1..23: mol_type = other DNA
aatattcagaaattatgaaccca

SEQ ID NO: 7952 - DNA, 23 bp, synthetic construct
  source 1..23: mol_type = other DNA
aaatattcagaaattatgaaccc

SEQ ID NO: 7953 - DNA, 23 bp, synthetic construct
  source 1..23: mol_type = other DNA
taaatattcagaaattatgaacc

SEQ ID NO: 7954 - DNA, 23 bp, synthetic construct
  source 1..23: mol_type = other DNA
ctaaatattcagaaattatgaac

SEQ ID NO: 7955 - DNA, 23 bp, synthetic construct
  source 1..23: mol_type = other DNA
tctaaatattcagaaattatgaa

SEQ ID NO: 7956 - DNA, 23 bp, synthetic construct
  source 1..23: mol_type = other DNA
atctaaatattcagaaattatga

SEQ ID NO: 7957 - DNA, 23 bp, synthetic construct
  source 1..23: mol_type = other DNA
catctaaatattcagaaattatg

SEQ ID NO: 7958 - DNA, 23 bp, synthetic construct
  source 1..23: mol_type = other DNA
ccatctaaatattcagaaattat

SEQ ID NO: 7959 - DNA, 23 bp, synthetic construct
  source 1..23: mol_type = other DNA
tccatctaaatattcagaaatta

SEQ ID NO: 7960 - DNA, 23 bp, synthetic construct
  source 1..23: mol_type = other DNA
atccatctaaatattcagaaatt

SEQ ID NO: 7961 - DNA, 23 bp, synthetic construct
  source 1..23: mol_type = other DNA
catccatctaaatattcagaaat

SEQ ID NO: 7962 - DNA, 23 bp, synthetic construct
  source 1..23: mol_type = other DNA
ccatccatctaaatattcagaaa

SEQ ID NO: 7963 - DNA, 23 bp, synthetic construct
  source 1..23: mol_type = other DNA
accatccatctaaatattcagaa

SEQ ID NO: 7964 - DNA, 23 bp, synthetic construct
  source 1..23: mol_type = other DNA
aaccatccatctaaatattcaga

SEQ ID NO: 7965 - DNA, 23 bp, synthetic construct
  source 1..23: mol_type = other DNA
caaccatccatctaaatattcag

SEQ ID NO: 7966 - DNA, 23 bp, synthetic construct
  source 1..23: mol_type = other DNA
acaaccatccatctaaatattca

SEQ ID NO: 7967 - DNA, 23 bp, synthetic construct
  source 1..23: mol_type = other DNA
cacaaccatccatctaaatattc

SEQ ID NO: 7968 - DNA, 23 bp, synthetic construct
  source 1..23: mol_type = other DNA
tcacaaccatccatctaaatatt

SEQ ID NO: 7969 - DNA, 23 bp, synthetic construct
  source 1..23: mol_type = other DNA
ctcacaaccatccatctaaatat

SEQ ID NO: 7970 - DNA, 23 bp, synthetic construct
  source 1..23: mol_type = other DNA
actcacaaccatccatctaaata

SEQ ID NO: 7971 - DNA, 23 bp, synthetic construct
  source 1..23: mol_type = other DNA
cactcacaaccatccatctaaat

SEQ ID NO: 7972 - DNA, 23 bp, synthetic construct
  source 1..23: mol_type = other DNA
ccactcacaaccatccatctaaa

SEQ ID NO: 7973 - DNA, 23 bp, synthetic construct
  source 1..23: mol_type = other DNA
gccactcacaaccatccatctaa

SEQ ID NO: 7974 - DNA, 23 bp, synthetic construct
  source 1..23: mol_type = other DNA
agccactcacaaccatccatcta

SEQ ID NO: 7975 - DNA, 23 bp, synthetic construct
  source 1..23: mol_type = other DNA
cagccactcacaaccatccatct

SEQ ID NO: 7976 - DNA, 23 bp, synthetic construct
  source 1..23: mol_type = other DNA
ccagccactcacaaccatccatc

SEQ ID NO: 7977 - DNA, 23 bp, synthetic construct
  source 1..23: mol_type = other DNA
accagccactcacaaccatccat

SEQ ID NO: 7978 - DNA, 23 bp, synthetic construct
  source 1..23: mol_type = other DNA
caccagccactcacaaccatcca

SEQ ID NO: 7979 - DNA, 23 bp, synthetic construct
  source 1..23: mol_type = other DNA
ccaccagccactcacaaccatcc

SEQ ID NO: 7980 - DNA, 23 bp, synthetic construct
  source 1..23: mol_type = other DNA
tccaccagccactcacaaccatc

SEQ ID NO: 7981 - DNA, 23 bp, synthetic construct
  source 1..23: mol_type = other DNA
gtccaccagccactcacaaccat

SEQ ID NO: 7982 - DNA, 23 bp, synthetic construct
  source 1..23: mol_type = other DNA
tgtccaccagccactcacaacca

SEQ ID NO: 7983 - DNA, 23 bp, synthetic construct
  source 1..23: mol_type = other DNA
ctgtccaccagccactcacaacc

SEQ ID NO: 7984 - DNA, 23 bp, synthetic construct
  source 1..23: mol_type = other DNA
tctgtccaccagccactcacaac

SEQ ID NO: 7985 - DNA, 23 bp, synthetic construct
  source 1..23: mol_type = other DNA
gtctgtccaccagccactcacaa

SEQ ID NO: 7986 - DNA, 23 bp, synthetic construct
  source 1..23: mol_type = other DNA
cgtctgtccaccagccactcaca

SEQ ID NO: 7987 - DNA, 23 bp, synthetic construct
  source 1..23: mol_type = other DNA
tcgtctgtccaccagccactcac

SEQ ID NO: 7988 - DNA, 23 bp, synthetic construct
  source 1..23: mol_type = other DNA
ttcgtctgtccaccagccactca

SEQ ID NO: 7989 - DNA, 23 bp, synthetic construct
  source 1..23: mol_type = other DNA
tttcgtctgtccaccagccactc

SEQ ID NO: 7990 - DNA, 23 bp, synthetic construct
  source 1..23: mol_type = other DNA
ttttcgtctgtccaccagccact

SEQ ID NO: 7991 - DNA, 23 bp, synthetic construct
  source 1..23: mol_type = other DNA
tttttcgtctgtccaccagccac

SEQ ID NO: 7992 - DNA, 23 bp, synthetic construct
  source 1..23: mol_type = other DNA
atttttcgtctgtccaccagcca

SEQ ID NO: 7993 - DNA, 23 bp, synthetic construct
  source 1..23: mol_type = other DNA
catttttcgtctgtccaccagcc

SEQ ID NO: 7994 - DNA, 23 bp, synthetic construct
  source 1..23: mol_type = other DNA
ccatttttcgtctgtccaccagc

SEQ ID NO: 7995 - DNA, 23 bp, synthetic construct
  source 1..23: mol_type = other DNA
tccatttttcgtctgtccaccag

SEQ ID NO: 7996 - DNA, 23 bp, synthetic construct
  source 1..23: mol_type = other DNA
atccatttttcgtctgtccacca

SEQ ID NO: 7997 - DNA, 23 bp, synthetic construct
  source 1..23: mol_type = other DNA
catccatttttcgtctgtccacc

SEQ ID NO: 7998 - DNA, 23 bp, synthetic construct
  source 1..23: mol_type = other DNA
ccatccatttttcgtctgtccac

SEQ ID NO: 7999 - DNA, 23 bp, synthetic construct
  source 1..23: mol_type = other DNA
accatccatttttcgtctgtcca

SEQ ID NO: 8000 - DNA, 23 bp, synthetic construct
  source 1..23: mol_type = other DNA
aaccatccatttttcgtctgtcc

SEQ ID NO: 8001 - DNA, 23 bp, synthetic construct
  source 1..23: mol_type = other DNA
caaccatccatttttcgtctgtc

SEQ ID NO: 8002 - DNA, 23 bp, synthetic construct
  source 1..23: mol_type = other DNA
ccaaccatccatttttcgtctgt

SEQ ID NO: 8003 - DNA, 23 bp, synthetic construct
  source 1..23: mol_type = other DNA
tccaaccatccatttttcgtctg

SEQ ID NO: 8004 - DNA, 23 bp, synthetic construct
  source 1..23: mol_type = other DNA
atccaaccatccatttttcgtct

SEQ ID NO: 8005 - DNA, 23 bp, synthetic construct
  source 1..23: mol_type = other DNA
tatccaaccatccatttttcgtc

SEQ ID NO: 8006 - DNA, 23 bp, synthetic construct
  source 1..23: mol_type = other DNA
ttatccaaccatccatttttcgt

SEQ ID NO: 8007 - DNA, 23 bp, synthetic construct
  source 1..23: mol_type = other DNA
tttatccaaccatccatttttcg

SEQ ID NO: 8008 - DNA, 23 bp, synthetic construct
  source 1..23: mol_type = other DNA
atttatccaaccatccatttttc

SEQ ID NO: 8009 - DNA, 23 bp, synthetic construct
  source 1..23: mol_type = other DNA
aatttatccaaccatccattttt

SEQ ID NO: 8010 - DNA, 23 bp, synthetic construct
  source 1..23: mol_type = other DNA
caatttatccaaccatccatttt

SEQ ID NO: 8011 - DNA, 23 bp, synthetic construct
  source 1..23: mol_type = other DNA
tcaatttatccaaccatccattt

SEQ ID NO: 8012 - DNA, 23 bp, synthetic construct
  source 1..23: mol_type = other DNA
atcaatttatccaaccatccatt

SEQ ID NO: 8013 - DNA, 23 bp, synthetic construct
  source 1..23: mol_type = other DNA
catcaatttatccaaccatccat

SEQ ID NO: 8014 - DNA, 23 bp, synthetic construct
  source 1..23: mol_type = other DNA
ccatcaatttatccaaccatcca

SEQ ID NO: 8015 - DNA, 23 bp, synthetic construct
  source 1..23: mol_type = other DNA
cccatcaatttatccaaccatcc

SEQ ID NO: 8016 - DNA, 23 bp, synthetic construct
  source 1..23: mol_type = other DNA
acccatcaatttatccaaccatc

SEQ ID NO: 8017 - DNA, 23 bp, synthetic construct
  source 1..23: mol_type = other DNA
cacccatcaatttatccaaccat

SEQ ID NO: 8018 - DNA, 23 bp, synthetic construct
  source 1..23: mol_type = other DNA
ccacccatcaatttatccaacca

SEQ ID NO: 8019 - DNA, 23 bp, synthetic construct
  source 1..23: mol_type = other DNA
tccacccatcaatttatccaacc

SEQ ID NO: 8020 - DNA, 23 bp, synthetic construct
  source 1..23: mol_type = other DNA
atccacccatcaatttatccaac

SEQ ID NO: 8021 - DNA, 23 bp, synthetic construct
  source 1..23: mol_type = other DNA
catccacccatcaatttatccaa

SEQ ID NO: 8022 - DNA, 23 bp, synthetic construct
  source 1..23: mol_type = other DNA
ccatccacccatcaatttatcca

SEQ ID NO: 8023 - DNA, 23 bp, synthetic construct
  source 1..23: mol_type = other DNA
tccatccacccatcaatttatcc

SEQ ID NO: 8024 - DNA, 23 bp, synthetic construct
  source 1..23: mol_type = other DNA
atccatccacccatcaatttatc

SEQ ID NO: 8025 - DNA, 23 bp, synthetic construct
  source 1..23: mol_type = other DNA
catccatccacccatcaatttat

SEQ ID NO: 8026 - DNA, 23 bp, synthetic construct
  source 1..23: mol_type = other DNA
ccatccatccacccatcaattta

SEQ ID NO: 8027 - DNA, 23 bp, synthetic construct
  source 1..23: mol_type = other DNA
accatccatccacccatcaattt

SEQ ID NO: 8028 - DNA, 23 bp, synthetic construct
  source 1..23: mol_type = other DNA
aaccatccatccacccatcaatt

SEQ ID NO: 8029 - DNA, 23 bp, synthetic construct
  source 1..23: mol_type = other DNA
caaccatccatccacccatcaat

SEQ ID NO: 8030 - DNA, 23 bp, synthetic construct
  source 1..23: mol_type = other DNA
ccaaccatccatccacccatcaa

SEQ ID NO: 8031 - DNA, 23 bp, synthetic construct
  source 1..23: mol_type = other DNA
accaaccatccatccacccatca

SEQ ID NO: 8032 - DNA, 23 bp, synthetic construct
  source 1..23: mol_type = other DNA
aaccaaccatccatccacccatc

SEQ ID NO: 8033 - DNA, 23 bp, synthetic construct
  source 1..23: mol_type = other DNA
caaccaaccatccatccacccat

SEQ ID NO: 8034 - DNA, 23 bp, synthetic construct
  source 1..23: mol_type = other DNA
acaaccaaccatccatccaccca

SEQ ID NO: 8035 - DNA, 23 bp, synthetic construct
  source 1..23: mol_type = other DNA
tacaaccaaccatccatccaccc

SEQ ID NO: 8036 - DNA, 23 bp, synthetic construct
  source 1..23: mol_type = other DNA
atacaaccaaccatccatccacc

SEQ ID NO: 8037 - DNA, 23 bp, synthetic construct
  source 1..23: mol_type = other DNA
catacaaccaaccatccatccac

SEQ ID NO: 8038 - DNA, 23 bp, synthetic construct
  source 1..23: mol_type = other DNA
tcatacaaccaaccatccatcca

SEQ ID NO: 8039 - DNA, 23 bp, synthetic construct
  source 1..23: mol_type = other DNA
ttcatacaaccaaccatccatcc

SEQ ID NO: 8040 - DNA, 23 bp, synthetic construct
  source 1..23: mol_type = other DNA
tttcatacaaccaaccatccatc

SEQ ID NO: 8041 - DNA, 23 bp, synthetic construct
  source 1..23: mol_type = other DNA
ctttcatacaaccaaccatccat

SEQ ID NO: 8042 - DNA, 23 bp, synthetic construct
  source 1..23: mol_type = other DNA
tctttcatacaaccaaccatcca

SEQ ID NO: 8043 - DNA, 23 bp, synthetic construct
  source 1..23: mol_type = other DNA
ttctttcatacaaccaaccatcc

SEQ ID NO: 8044 - DNA, 23 bp, synthetic construct
  source 1..23: mol_type = other DNA
attctttcatacaaccaaccatc

SEQ ID NO: 8045 - DNA, 23 bp, synthetic construct
  source 1..23: mol_type = other DNA
cattctttcatacaaccaaccat

SEQ ID NO: 8046 - DNA, 23 bp, synthetic construct
  source 1..23: mol_type = other DNA
tcattctttcatacaaccaacca

SEQ ID NO: 8047 - DNA, 23 bp, synthetic construct
  source 1..23: mol_type = other DNA
ttcattctttcatacaaccaacc

SEQ ID NO: 8048 - DNA, 23 bp, synthetic construct
  source 1..23: mol_type = other DNA
attcattctttcatacaaccaac

SEQ ID NO: 8049 - DNA, 23 bp, synthetic construct
  source 1..23: mol_type = other DNA
cattcattctttcatacaaccaa

SEQ ID NO: 8050 - DNA, 23 bp, synthetic construct
  source 1..23: mol_type = other DNA
tcattcattctttcatacaacca

SEQ ID NO: 8051 - DNA, 23 bp, synthetic construct
  source 1..23: mol_type = other DNA
atcattcattctttcatacaacc

SEQ ID NO: 8052 - DNA, 23 bp, synthetic construct
  source 1..23: mol_type = other DNA
aatcattcattctttcatacaac

SEQ ID NO: 8053 - DNA, 23 bp, synthetic construct
  source 1..23: mol_type = other DNA
caatcattcattctttcatacaa

SEQ ID NO: 8054 - DNA, 23 bp, synthetic construct
  source 1..23: mol_type = other DNA
ccaatcattcattctttcataca

SEQ ID NO: 8055 - DNA, 23 bp, synthetic construct
  source 1..23: mol_type = other DNA
cccaatcattcattctttcatac

SEQ ID NO: 8056 - DNA, 23 bp, synthetic construct
  source 1..23: mol_type = other DNA
acccaatcattcattctttcata

SEQ ID NO: 8057 - DNA, 23 bp, synthetic construct
  source 1..23: mol_type = other DNA
tacccaatcattcattctttcat

SEQ ID NO: 8058 - DNA, 23 bp, synthetic construct
  source 1..23: mol_type = other DNA
ctacccaatcattcattctttca

SEQ ID NO: 8059 - DNA, 23 bp, synthetic construct
  source 1..23: mol_type = other DNA
cctacccaatcattcattctttc

SEQ ID NO: 8060 - DNA, 23 bp, synthetic construct
  source 1..23: mol_type = other DNA
acctacccaatcattcattcttt

SEQ ID NO: 8061 - DNA, 23 bp, synthetic construct
  source 1..23: mol_type = other DNA
cacctacccaatcattcattctt

SEQ ID NO: 8062 - DNA, 23 bp, synthetic construct
  source 1..23: mol_type = other DNA
ccacctacccaatcattcattct

SEQ ID NO: 8063 - DNA, 23 bp, synthetic construct
  source 1..23: mol_type = other DNA
tccacctacccaatcattcattc

SEQ ID NO: 8064 - DNA, 23 bp, synthetic construct
  source 1..23: mol_type = other DNA
atccacctacccaatcattcatt

SEQ ID NO: 8065 - DNA, 23 bp, synthetic construct
  source 1..23: mol_type = other DNA
aatccacctacccaatcattcat

SEQ ID NO: 8066 - DNA, 23 bp, synthetic construct
  source 1..23: mol_type = other DNA
taatccacctacccaatcattca

SEQ ID NO: 8067 - DNA, 23 bp, synthetic construct
  source 1..23: mol_type = other DNA
ttaatccacctacccaatcattc

SEQ ID NO: 8068 - DNA, 23 bp, synthetic construct
  source 1..23: mol_type = other DNA
cttaatccacctacccaatcatt

SEQ ID NO: 8069 - DNA, 23 bp, synthetic construct
  source 1..23: mol_type = other DNA
acttaatccacctacccaatcat

SEQ ID NO: 8070 - DNA, 23 bp, synthetic construct
  source 1..23: mol_type = other DNA
aacttaatccacctacccaatca

SEQ ID NO: 8071 - DNA, 23 bp, synthetic construct
  source 1..23: mol_type = other DNA
caacttaatccacctacccaatc

SEQ ID NO: 8072 - DNA, 23 bp, synthetic construct
  source 1..23: mol_type = other DNA
gcaacttaatccacctacccaat

SEQ ID NO: 8073 - DNA, 23 bp, synthetic construct
  source 1..23: mol_type = other DNA
cgcaacttaatccacctacccaa

SEQ ID NO: 8074 - DNA, 23 bp, synthetic construct
  source 1..23: mol_type = other DNA
ccgcaacttaatccacctaccca

SEQ ID NO: 8075 - DNA, 23 bp, synthetic construct
  source 1..23: mol_type = other DNA
tccgcaacttaatccacctaccc

SEQ ID NO: 8076 - DNA, 23 bp, synthetic construct
  source 1..23: mol_type = other DNA
atccgcaacttaatccacctacc

SEQ ID NO: 8077 - DNA, 23 bp, synthetic construct
  source 1..23: mol_type = other DNA
gatccgcaacttaatccacctac

SEQ ID NO: 8078 - DNA, 23 bp, synthetic construct
  source 1..23: mol_type = other DNA
tgatccgcaacttaatccaccta

SEQ ID NO: 8079 - DNA, 23 bp, synthetic construct
  source 1..23: mol_type = other DNA
ttgatccgcaacttaatccacct

SEQ ID NO: 8080 - DNA, 23 bp, synthetic construct
  source 1..23: mol_type = other DNA
attgatccgcaacttaatccacc

SEQ ID NO: 8081 - DNA, 23 bp, synthetic construct
  source 1..23: mol_type = other DNA
cattgatccgcaacttaatccac

SEQ ID NO: 8082 - DNA, 23 bp, synthetic construct
  source 1..23: mol_type = other DNA
acattgatccgcaacttaatcca

SEQ ID NO: 8083 - DNA, 23 bp, synthetic construct
  source 1..23: mol_type = other DNA
tacattgatccgcaacttaatcc

SEQ ID NO: 8084 - DNA, 23 bp, synthetic construct
  source 1..23: mol_type = other DNA
atacattgatccgcaacttaatc

SEQ ID NO: 8085 - DNA, 23 bp, synthetic construct
  source 1..23: mol_type = other DNA
catacattgatccgcaacttaat

SEQ ID NO: 8086 - DNA, 23 bp, synthetic construct
  source 1..23: mol_type = other DNA
ccatacattgatccgcaacttaa

SEQ ID NO: 8087 - DNA, 23 bp, synthetic construct
  source 1..23: mol_type = other DNA
cccatacattgatccgcaactta

SEQ ID NO: 8088 - DNA, 23 bp, synthetic construct
  source 1..23: mol_type = other DNA
tcccatacattgatccgcaactt

SEQ ID NO: 8089 - DNA, 23 bp, synthetic construct
  source 1..23: mol_type = other DNA
atcccatacattgatccgcaact

SEQ ID NO: 8090 - DNA, 23 bp, synthetic construct
  source 1..23: mol_type = other DNA
catcccatacattgatccgcaac

SEQ ID NO: 8091 - DNA, 23 bp, synthetic construct
  source 1..23: mol_type = other DNA
ccatcccatacattgatccgcaa

SEQ ID NO: 8092 - DNA, 23 bp, synthetic construct
  source 1..23: mol_type = other DNA
tccatcccatacattgatccgca

SEQ ID NO: 8093 - DNA, 23 bp, synthetic construct
  source 1..23: mol_type = other DNA
atccatcccatacattgatccgc

SEQ ID NO: 8094 - DNA, 23 bp, synthetic construct
  source 1..23: mol_type = other DNA
catccatcccatacattgatccg

SEQ ID NO: 8095 - DNA, 23 bp, synthetic construct
  source 1..23: mol_type = other DNA
tcatccatcccatacattgatcc

SEQ ID NO: 8096 - DNA, 23 bp, synthetic construct
  source 1..23: mol_type = other DNA
ttcatccatcccatacattgatc

SEQ ID NO: 8097 - DNA, 23 bp, synthetic construct
  source 1..23: mol_type = other DNA
attcatccatcccatacattgat

SEQ ID NO: 8098 - DNA, 23 bp, synthetic construct
  source 1..23: mol_type = other DNA
cattcatccatcccatacattga

SEQ ID NO: 8099 - DNA, 23 bp, synthetic construct
  source 1..23: mol_type = other DNA
ccattcatccatcccatacattg

SEQ ID NO: 8100 - DNA, 23 bp, synthetic construct
  source 1..23: mol_type = other DNA
tccattcatccatcccatacatt

SEQ ID NO: 8101 - DNA, 23 bp, synthetic construct
  source 1..23: mol_type = other DNA
atccattcatccatcccatacat

SEQ ID NO: 8102 - DNA, 23 bp, synthetic construct
  source 1..23: mol_type = other DNA
catccattcatccatcccataca

SEQ ID NO: 8103 - DNA, 23 bp, synthetic construct
  source 1..23: mol_type = other DNA
ccatccattcatccatcccatac

SEQ ID NO: 8104 - DNA, 23 bp, synthetic construct
  source 1..23: mol_type = other DNA
tccatccattcatccatcccata

SEQ ID NO: 8105 - DNA, 23 bp, synthetic construct
  source 1..23: mol_type = other DNA
atccatccattcatccatcccat

SEQ ID NO: 8106 - DNA, 23 bp, synthetic construct
  source 1..23: mol_type = other DNA
catccatccattcatccatccca

SEQ ID NO: 8107 - DNA, 23 bp, synthetic construct
  source 1..23: mol_type = other DNA
ccatccatccattcatccatccc

SEQ ID NO: 8108 - DNA, 23 bp, synthetic construct
  source 1..23: mol_type = other DNA
tccatccatccattcatccatcc

SEQ ID NO: 8109 - DNA, 23 bp, synthetic construct
  source 1..23: mol_type = other DNA
atccatccatccattcatccatc

SEQ ID NO: 8110 - DNA, 23 bp, synthetic construct
  source 1..23: mol_type = other DNA
catccatccatccattcatccat

SEQ ID NO: 8111 - DNA, 23 bp, synthetic construct
  source 1..23: mol_type = other DNA
ccatccatccatccattcatcca

SEQ ID NO: 8112 - DNA, 23 bp, synthetic construct
  source 1..23: mol_type = other DNA
tccatccatccatccattcatcc

SEQ ID NO: 8113 - DNA, 23 bp, synthetic construct
  source 1..23: mol_type = other DNA
atccatccatccatccattcatc

SEQ ID NO: 8114 - DNA, 23 bp, synthetic construct
  source 1..23: mol_type = other DNA
catccatccatccatccattcat

SEQ ID NO: 8115 - DNA, 23 bp, synthetic construct
  source 1..23: mol_type = other DNA
acatccatccatccatccattca

SEQ ID NO: 8116 - DNA, 23 bp, synthetic construct
  source 1..23: mol_type = other DNA
cacatccatccatccatccattc

SEQ ID NO: 8117 - DNA, 23 bp, synthetic construct
  source 1..23: mol_type = other DNA
acacatccatccatccatccatt

SEQ ID NO: 8118 - DNA, 23 bp, synthetic construct
  source 1..23: mol_type = other DNA
cacacatccatccatccatccat

SEQ ID NO: 8119 - DNA, 23 bp, synthetic construct
  source 1..23: mol_type = other DNA
ccacacatccatccatccatcca

SEQ ID NO: 8120 - DNA, 23 bp, synthetic construct
  source 1..23: mol_type = other DNA
accacacatccatccatccatcc

SEQ ID NO: 8121 - DNA, 23 bp, synthetic construct
  source 1..23: mol_type = other DNA
aaccacacatccatccatccatc

SEQ ID NO: 8122 - DNA, 23 bp, synthetic construct
  source 1..23: mol_type = other DNA
caaccacacatccatccatccat

SEQ ID NO: 8123 - DNA, 23 bp, synthetic construct
  source 1..23: mol_type = other DNA
tcaaccacacatccatccatcca

SEQ ID NO: 8124 - DNA, 23 bp, synthetic construct
  source 1..23: mol_type = other DNA
ttcaaccacacatccatccatcc

SEQ ID NO: 8125 - DNA, 23 bp, synthetic construct
  source 1..23: mol_type = other DNA
attcaaccacacatccatccatc

SEQ ID NO: 8126 - DNA, 23 bp, synthetic construct
  source 1..23: mol_type = other DNA
aattcaaccacacatccatccat

SEQ ID NO: 8127 - DNA, 23 bp, synthetic construct
  source 1..23: mol_type = other DNA
taattcaaccacacatccatcca

SEQ ID NO: 8128 - DNA, 23 bp, synthetic construct
  source 1..23: mol_type = other DNA
gtaattcaaccacacatccatcc

SEQ ID NO: 8129 - DNA, 23 bp, synthetic construct
  source 1..23: mol_type = other DNA
agtaattcaaccacacatccatc

SEQ ID NO: 8130 - DNA, 23 bp, synthetic construct
  source 1..23: mol_type = other DNA
cagtaattcaaccacacatccat

SEQ ID NO: 8131 - DNA, 23 bp, synthetic construct
  source 1..23: mol_type = other DNA
tcagtaattcaaccacacatcca

SEQ ID NO: 8132 - DNA, 23 bp, synthetic construct
  source 1..23: mol_type = other DNA
ttcagtaattcaaccacacatcc

SEQ ID NO: 8133 - DNA, 23 bp, synthetic construct
  source 1..23: mol_type = other DNA
tttcagtaattcaaccacacatc

SEQ ID NO: 8134 - DNA, 23 bp, synthetic construct
  source 1..23: mol_type = other DNA
ctttcagtaattcaaccacacat

SEQ ID NO: 8135 - DNA, 23 bp, synthetic construct
  source 1..23: mol_type = other DNA
cctttcagtaattcaaccacaca

SEQ ID NO: 8136 - DNA, 23 bp, synthetic construct
  source 1..23: mol_type = other DNA
acctttcagtaattcaaccacac

SEQ ID NO: 8137 - DNA, 23 bp, synthetic construct
  source 1..23: mol_type = other DNA
aacctttcagtaattcaaccaca

SEQ ID NO: 8138 - DNA, 23 bp, synthetic construct
  source 1..23: mol_type = other DNA
caacctttcagtaattcaaccac

SEQ ID NO: 8139 - DNA, 23 bp, synthetic construct
  source 1..23: mol_type = other DNA
ccaacctttcagtaattcaacca

SEQ ID NO: 8140 - DNA, 23 bp, synthetic construct
  source 1..23: mol_type = other DNA
tccaacctttcagtaattcaacc

SEQ ID NO: 8141 - DNA, 23 bp, synthetic construct
  source 1..23: mol_type = other DNA
ttccaacctttcagtaattcaac

SEQ ID NO: 8142 - DNA, 23 bp, synthetic construct
  source 1..23: mol_type = other DNA
cttccaacctttcagtaattcaa

SEQ ID NO: 8143 - DNA, 23 bp, synthetic construct
  source 1..23: mol_type = other DNA
tcttccaacctttcagtaattca

SEQ ID NO: 8144 - DNA, 23 bp, synthetic construct
  source 1..23: mol_type = other DNA
ctcttccaacctttcagtaattc

SEQ ID NO: 8145 - DNA, 23 bp, synthetic construct
  source 1..23: mol_type = other DNA
actcttccaacctttcagtaatt

SEQ ID NO: 8146 - DNA, 23 bp, synthetic construct
  source 1..23: mol_type = other DNA
cactcttccaacctttcagtaat

SEQ ID NO: 8147 - DNA, 23 bp, synthetic construct
  source 1..23: mol_type = other DNA
ccactcttccaacctttcagtaa

SEQ ID NO: 8148 - DNA, 23 bp, synthetic construct
  source 1..23: mol_type = other DNA
tccactcttccaacctttcagta

SEQ ID NO: 8149 - DNA, 23 bp, synthetic construct
  source 1..23: mol_type = other DNA
atccactcttccaacctttcagt

SEQ ID NO: 8150 - DNA, 23 bp, synthetic construct
  source 1..23: mol_type = other DNA
catccactcttccaacctttcag

SEQ ID NO: 8151 - DNA, 23 bp, synthetic construct
  source 1..23: mol_type = other DNA
ccatccactcttccaacctttca

SEQ ID NO: 8152 - DNA, 23 bp, synthetic construct
  source 1..23: mol_type = other DNA
cccatccactcttccaacctttc

SEQ ID NO: 8153 - DNA, 23 bp, synthetic construct
  source 1..23: mol_type = other DNA
acccatccactcttccaaccttt

SEQ ID NO: 8154 - DNA, 23 bp, synthetic construct
  source 1..23: mol_type = other DNA
cacccatccactcttccaacctt

SEQ ID NO: 8155 - DNA, 23 bp, synthetic construct
  source 1..23: mol_type = other DNA
tcacccatccactcttccaacct

SEQ ID NO: 8156 - DNA, 23 bp, synthetic construct
  source 1..23: mol_type = other DNA
ttcacccatccactcttccaacc

SEQ ID NO: 8157 - DNA, 23 bp, synthetic construct
  source 1..23: mol_type = other DNA
tttcacccatccactcttccaac

SEQ ID NO: 8158 - DNA, 23 bp, synthetic construct
  source 1..23: mol_type = other DNA
atttcacccatccactcttccaa

SEQ ID NO: 8159 - DNA, 23 bp, synthetic construct
  source 1..23: mol_type = other DNA
aatttcacccatccactcttcca

SEQ ID NO: 8160 - DNA, 23 bp, synthetic construct
  source 1..23: mol_type = other DNA
aaatttcacccatccactcttcc

SEQ ID NO: 8161 - DNA, 23 bp, synthetic construct
  source 1..23: mol_type = other DNA
caaatttcacccatccactcttc

SEQ ID NO: 8162 - DNA, 23 bp, synthetic construct
  source 1..23: mol_type = other DNA
ccaaatttcacccatccactctt

SEQ ID NO: 8163 - DNA, 23 bp, synthetic construct
  source 1..23: mol_type = other DNA
cccaaatttcacccatccactct

SEQ ID NO: 8164 - DNA, 23 bp, synthetic construct
  source 1..23: mol_type = other DNA
ccccaaatttcacccatccactc

SEQ ID NO: 8165 - DNA, 23 bp, synthetic construct
  source 1..23: mol_type = other DNA
accccaaatttcacccatccact

SEQ ID NO: 8166 - DNA, 23 bp, synthetic construct
  source 1..23: mol_type = other DNA
taccccaaatttcacccatccac

SEQ ID NO: 8167 - DNA, 23 bp, synthetic construct
  source 1..23: mol_type = other DNA
ctaccccaaatttcacccatcca

SEQ ID NO: 8168 - DNA, 23 bp, synthetic construct
  source 1..23: mol_type = other DNA
actaccccaaatttcacccatcc

SEQ ID NO: 8169 - DNA, 23 bp, synthetic construct
  source 1..23: mol_type = other DNA
aactaccccaaatttcacccatc

SEQ ID NO: 8170 - DNA, 23 bp, synthetic construct
  source 1..23: mol_type = other DNA
taactaccccaaatttcacccat

SEQ ID NO: 8171 - DNA, 23 bp, synthetic construct
  source 1..23: mol_type = other DNA
ctaactaccccaaatttcaccca

SEQ ID NO: 8172 - DNA, 23 bp, synthetic construct
  source 1..23: mol_type = other DNA
tctaactaccccaaatttcaccc

SEQ ID NO: 8173 - DNA, 23 bp, synthetic construct
  source 1..23: mol_type = other DNA
atctaactaccccaaatttcacc

SEQ ID NO: 8174 - DNA, 23 bp, synthetic construct
  source 1..23: mol_type = other DNA
catctaactaccccaaatttcac

SEQ ID NO: 8175 - DNA, 23 bp, synthetic construct
  source 1..23: mol_type = other DNA
ccatctaactaccccaaatttca

SEQ ID NO: 8176 - DNA, 23 bp, synthetic construct
  source 1..23: mol_type = other DNA
cccatctaactaccccaaatttc

SEQ ID NO: 8177 - DNA, 23 bp, synthetic construct
  source 1..23: mol_type = other DNA
acccatctaactaccccaaattt

SEQ ID NO: 8178 - DNA, 23 bp, synthetic construct
  source 1..23: mol_type = other DNA
cacccatctaactaccccaaatt

SEQ ID NO: 8179 - DNA, 23 bp, synthetic construct
  source 1..23: mol_type = other DNA
ccacccatctaactaccccaaat

SEQ ID NO: 8180 - DNA, 23 bp, synthetic construct
  source 1..23: mol_type = other DNA
cccacccatctaactaccccaaa

SEQ ID NO: 8181 - DNA, 23 bp, synthetic construct
  source 1..23: mol_type = other DNA
acccacccatctaactaccccaa

SEQ ID NO: 8182 - DNA, 23 bp, synthetic construct
  source 1..23: mol_type = other DNA
cacccacccatctaactacccca

SEQ ID NO: 8183 - DNA, 23 bp, synthetic construct
  source 1..23: mol_type = other DNA
acacccacccatctaactacccc

SEQ ID NO: 8184 - DNA, 23 bp, synthetic construct
  source 1..23: mol_type = other DNA
cacacccacccatctaactaccc

SEQ ID NO: 8185 - DNA, 23 bp, synthetic construct
  source 1..23: mol_type = other DNA
acacacccacccatctaactacc

SEQ ID NO: 8186 - DNA, 23 bp, synthetic construct
  source 1..23: mol_type = other DNA
cacacacccacccatctaactac

SEQ ID NO: 8187 - DNA, 23 bp, synthetic construct
  source 1..23: mol_type = other DNA
ccacacacccacccatctaacta

SEQ ID NO: 8188 - DNA, 23 bp, synthetic construct
  source 1..23: mol_type = other DNA
tccacacacccacccatctaact

SEQ ID NO: 8189 - DNA, 23 bp, synthetic construct
  source 1..23: mol_type = other DNA
atccacacacccacccatctaac

SEQ ID NO: 8190 - DNA, 23 bp, synthetic construct
  source 1..23: mol_type = other DNA
catccacacacccacccatctaa

SEQ ID NO: 8191 - DNA, 23 bp, synthetic construct
  source 1..23: mol_type = other DNA
ccatccacacacccacccatcta

SEQ ID NO: 8192 - DNA, 23 bp, synthetic construct
  source 1..23: mol_type = other DNA
tccatccacacacccacccatct

SEQ ID NO: 8193 - DNA, 23 bp, synthetic construct
  source 1..23: mol_type = other DNA
atccatccacacacccacccatc

SEQ ID NO: 8194 - DNA, 23 bp, synthetic construct
  source 1..23: mol_type = other DNA
tatccatccacacacccacccat

SEQ ID NO: 8195 - DNA, 23 bp, synthetic construct
  source 1..23: mol_type = other DNA
ttatccatccacacacccaccca

SEQ ID NO: 8196 - DNA, 23 bp, synthetic construct
  source 1..23: mol_type = other DNA
tttatccatccacacacccaccc

SEQ ID NO: 8197 - DNA, 23 bp, synthetic construct
  source 1..23: mol_type = other DNA
ttttatccatccacacacccacc

SEQ ID NO: 8198 - DNA, 23 bp, synthetic construct
  source 1..23: mol_type = other DNA
cttttatccatccacacacccac

SEQ ID NO: 8199 - DNA, 23 bp, synthetic construct
  source 1..23: mol_type = other DNA
tcttttatccatccacacaccca

SEQ ID NO: 8200 - DNA, 23 bp, synthetic construct
  source 1..23: mol_type = other DNA
ctcttttatccatccacacaccc

SEQ ID NO: 8201 - DNA, 23 bp, synthetic construct
  source 1..23: mol_type = other DNA
actcttttatccatccacacacc

SEQ ID NO: 8202 - DNA, 23 bp, synthetic construct
  source 1..23: mol_type = other DNA
tactcttttatccatccacacac

SEQ ID NO: 8203 - DNA, 23 bp, synthetic construct
  source 1..23: mol_type = other DNA
ctactcttttatccatccacaca

SEQ ID NO: 8204 - DNA, 23 bp, synthetic construct
  source 1..23: mol_type = other DNA
tctactcttttatccatccacac

SEQ ID NO: 8205 - DNA, 23 bp, synthetic construct
  source 1..23: mol_type = other DNA
atctactcttttatccatccaca

SEQ ID NO: 8206 - DNA, 23 bp, synthetic construct
  source 1..23: mol_type = other DNA
catctactcttttatccatccac

SEQ ID NO: 8207 - DNA, 23 bp, synthetic construct
  source 1..23: mol_type = other DNA
tcatctactcttttatccatcca

SEQ ID NO: 8208 - DNA, 23 bp, synthetic construct
  source 1..23: mol_type = other DNA
ttcatctactcttttatccatcc

SEQ ID NO: 8209 - DNA, 23 bp, synthetic construct
  source 1..23: mol_type = other DNA
attcatctactcttttatccatc

SEQ ID NO: 8210 - DNA, 23 bp, synthetic construct
  source 1..23: mol_type = other DNA
cattcatctactcttttatccat

SEQ ID NO: 8211 - DNA, 23 bp, synthetic construct
  source 1..23: mol_type = other DNA
tcattcatctactcttttatcca

SEQ ID NO: 8212 - DNA, 23 bp, synthetic construct
  source 1..23: mol_type = other DNA
ttcattcatctactcttttatcc

SEQ ID NO: 8213 - DNA, 23 bp, synthetic construct
  source 1..23: mol_type = other DNA
attcattcatctactcttttatc

SEQ ID NO: 8214 - DNA, 23 bp, synthetic construct
  source 1..23: mol_type = other DNA
aattcattcatctactcttttat

SEQ ID NO: 8215 - DNA, 23 bp, synthetic construct
  source 1..23: mol_type = other DNA
taattcattcatctactctttta

SEQ ID NO: 8216 - DNA, 23 bp, synthetic construct
  source 1..23: mol_type = other DNA
ttaattcattcatctactctttt

SEQ ID NO: 8217 - DNA, 23 bp, synthetic construct
  source 1..23: mol_type = other DNA
attaattcattcatctactcttt

SEQ ID NO: 8218 - DNA, 23 bp, synthetic construct
  source 1..23: mol_type = other DNA
cattaattcattcatctactctt

SEQ ID NO: 8219 - DNA, 23 bp, synthetic construct
  source 1..23: mol_type = other DNA
tcattaattcattcatctactct

SEQ ID NO: 8220 - DNA, 23 bp, synthetic construct
  source 1..23: mol_type = other DNA
ttcattaattcattcatctactc

SEQ ID NO: 8221 - DNA, 23 bp, synthetic construct
  source 1..23: mol_type = other DNA
attcattaattcattcatctact

SEQ ID NO: 8222 - DNA, 23 bp, synthetic construct
  source 1..23: mol_type = other DNA
tattcattaattcattcatctac

SEQ ID NO: 8223 - DNA, 23 bp, synthetic construct
  source 1..23: mol_type = other DNA
ttattcattaattcattcatcta

SEQ ID NO: 8224 - DNA, 23 bp, synthetic construct
  source 1..23: mol_type = other DNA
tttattcattaattcattcatct

SEQ ID NO: 8225 - DNA, 23 bp, synthetic construct
  source 1..23: mol_type = other DNA
gtttattcattaattcattcatc

SEQ ID NO: 8226 - DNA, 23 bp, synthetic construct
  source 1..23: mol_type = other DNA
tgtttattcattaattcattcat

SEQ ID NO: 8227 - DNA, 23 bp, synthetic construct
  source 1..23: mol_type = other DNA
ctgtttattcattaattcattca

SEQ ID NO: 8228 - DNA, 23 bp, synthetic construct
  source 1..23: mol_type = other DNA
cctgtttattcattaattcattc

SEQ ID NO: 8229 - DNA, 23 bp, synthetic construct
  source 1..23: mol_type = other DNA
gcctgtttattcattaattcatt

SEQ ID NO: 8230 - DNA, 23 bp, synthetic construct
  source 1..23: mol_type = other DNA
tgcctgtttattcattaattcat

SEQ ID NO: 8231 - DNA, 23 bp, synthetic construct
  source 1..23: mol_type = other DNA
ctgcctgtttattcattaattca

SEQ ID NO: 8232 - DNA, 23 bp, synthetic construct
  source 1..23: mol_type = other DNA
tctgcctgtttattcattaattc

SEQ ID NO: 8233 - DNA, 23 bp, synthetic construct
  source 1..23: mol_type = other DNA
atctgcctgtttattcattaatt

SEQ ID NO: 8234 - DNA, 23 bp, synthetic construct
  source 1..23: mol_type = other DNA
catctgcctgtttattcattaat

SEQ ID NO: 8235 - DNA, 23 bp, synthetic construct
  source 1..23: mol_type = other DNA
ccatctgcctgtttattcattaa

SEQ ID NO: 8236 - DNA, 23 bp, synthetic construct
  source 1..23: mol_type = other DNA
tccatctgcctgtttattcatta

SEQ ID NO: 8237 - DNA, 23 bp, synthetic construct
  source 1..23: mol_type = other DNA
atccatctgcctgtttattcatt

SEQ ID NO: 8238 - DNA, 23 bp, synthetic construct
  source 1..23: mol_type = other DNA
catccatctgcctgtttattcat

SEQ ID NO: 8239 - DNA, 23 bp, synthetic construct
  source 1..23: mol_type = other DNA
tcatccatctgcctgtttattca

SEQ ID NO: 8240 - DNA, 23 bp, synthetic construct
  source 1..23: mol_type = other DNA
atcatccatctgcctgtttattc

SEQ ID NO: 8241 - DNA, 23 bp, synthetic construct
  source 1..23: mol_type = other DNA
catcatccatctgcctgtttatt

SEQ ID NO: 8242 - DNA, 23 bp, synthetic construct
  source 1..23: mol_type = other DNA
acatcatccatctgcctgtttat

SEQ ID NO: 8243 - DNA, 23 bp, synthetic construct
  source 1..23: mol_type = other DNA
tacatcatccatctgcctgttta

SEQ ID NO: 8244 - DNA, 23 bp, synthetic construct
  source 1..23: mol_type = other DNA
ttacatcatccatctgcctgttt

SEQ ID NO: 8245 - DNA, 23 bp, synthetic construct
  source 1..23: mol_type = other DNA
cttacatcatccatctgcctgtt

SEQ ID NO: 8246 - DNA, 23 bp, synthetic construct
  source 1..23: mol_type = other DNA
gcttacatcatccatctgcctgt

SEQ ID NO: 8247 - DNA, 23 bp, synthetic construct
  source 1..23: mol_type = other DNA
agcttacatcatccatctgcctg

SEQ ID NO: 8248 - DNA, 23 bp, synthetic construct
  source 1..23: mol_type = other DNA
cagcttacatcatccatctgcct

SEQ ID NO: 8249 - DNA, 23 bp, synthetic construct
  source 1..23: mol_type = other DNA
gcagcttacatcatccatctgcc

SEQ ID NO: 8250 - DNA, 23 bp, synthetic construct
  source 1..23: mol_type = other DNA
ggcagcttacatcatccatctgc

SEQ ID NO: 8251 - DNA, 23 bp, synthetic construct
  source 1..23: mol_type = other DNA
gggcagcttacatcatccatctg

SEQ ID NO: 8252 - DNA, 23 bp, synthetic construct
  source 1..23: mol_type = other DNA
ggggcagcttacatcatccatct

SEQ ID NO: 8253 - DNA, 23 bp, synthetic construct
  source 1..23: mol_type = other DNA
tggggcagcttacatcatccatc

SEQ ID NO: 8254 - DNA, 23 bp, synthetic construct
  source 1..23: mol_type = other DNA
ctggggcagcttacatcatccat

SEQ ID NO: 8255 - DNA, 23 bp, synthetic construct
  source 1..23: mol_type = other DNA
tctggggcagcttacatcatcca

SEQ ID NO: 8256 - DNA, 23 bp, synthetic construct
  source 1..23: mol_type = other DNA
gtctggggcagcttacatcatcc

SEQ ID NO: 8257 - DNA, 23 bp, synthetic construct
  source 1..23: mol_type = other DNA
ggtctggggcagcttacatcatc

SEQ ID NO: 8258 - DNA, 23 bp, synthetic construct
  source 1..23: mol_type = other DNA
gggtctggggcagcttacatcat

SEQ ID NO: 8259 - DNA, 23 bp, synthetic construct
  source 1..23: mol_type = other DNA
agggtctggggcagcttacatca

SEQ ID NO: 8260 - DNA, 23 bp, synthetic construct
  source 1..23: mol_type = other DNA
cagggtctggggcagcttacatc

SEQ ID NO: 8261 - DNA, 23 bp, synthetic construct
  source 1..23: mol_type = other DNA
ccagggtctggggcagcttacat

SEQ ID NO: 8262 - DNA, 23 bp, synthetic construct
  source 1..23: mol_type = other DNA
cccagggtctggggcagcttaca

SEQ ID NO: 8263 - DNA, 23 bp, synthetic construct
  source 1..23: mol_type = other DNA
tcccagggtctggggcagcttac

SEQ ID NO: 8264 - DNA, 23 bp, synthetic construct
  source 1..23: mol_type = other DNA
gtcccagggtctggggcagctta

SEQ ID NO: 8265 - DNA, 23 bp, synthetic construct
  source 1..23: mol_type = other DNA
ggtcccagggtctggggcagctt

SEQ ID NO: 8266 - DNA, 23 bp, synthetic construct
  source 1..23: mol_type = other DNA
aggtcccagggtctggggcagct

SEQ ID NO: 8267 - DNA, 23 bp, synthetic construct
  source 1..23: mol_type = other DNA
gaggtcccagggtctggggcagc

SEQ ID NO: 8268 - DNA, 23 bp, synthetic construct
  source 1..23: mol_type = other DNA
agaggtcccagggtctggggcag

SEQ ID NO: 8269 - DNA, 23 bp, synthetic construct
  source 1..23: mol_type = other DNA
cagaggtcccagggtctggggca

SEQ ID NO: 8270 - DNA, 23 bp, synthetic construct
  source 1..23: mol_type = other DNA
tcagaggtcccagggtctggggc

SEQ ID NO: 8271 - DNA, 23 bp, synthetic construct
  source 1..23: mol_type = other DNA
gtcagaggtcccagggtctgggg

SEQ ID NO: 8272 - DNA, 23 bp, synthetic construct
  source 1..23: mol_type = other DNA
ggtcagaggtcccagggtctggg

SEQ ID NO: 8273 - DNA, 23 bp, synthetic construct
  source 1..23: mol_type = other DNA
gggtcagaggtcccagggtctgg

SEQ ID NO: 8274 - DNA, 23 bp, synthetic construct
  source 1..23: mol_type = other DNA
ggggtcagaggtcccagggtctg

SEQ ID NO: 8275 - DNA, 23 bp, synthetic construct
  source 1..23: mol_type = other DNA
gggggtcagaggtcccagggtct

SEQ ID NO: 8276 - DNA, 23 bp, synthetic construct
  source 1..23: mol_type = other DNA
cgggggtcagaggtcccagggtc

SEQ ID NO: 8277 - DNA, 23 bp, synthetic construct
  source 1..23: mol_type = other DNA
ccgggggtcagaggtcccagggt

SEQ ID NO: 8278 - DNA, 23 bp, synthetic construct
  source 1..23: mol_type = other DNA
gccgggggtcagaggtcccaggg

SEQ ID NO: 8279 - DNA, 23 bp, synthetic construct
  source 1..23: mol_type = other DNA
cgccgggggtcagaggtcccagg

SEQ ID NO: 8280 - DNA, 23 bp, synthetic construct
  source 1..23: mol_type = other DNA
tcgccgggggtcagaggtcccag

SEQ ID NO: 8281 - DNA, 23 bp, synthetic construct
  source 1..23: mol_type = other DNA
gtcgccgggggtcagaggtccca

SEQ ID NO: 8282 - DNA, 23 bp, synthetic construct
  source 1..23: mol_type = other DNA
ggtcgccgggggtcagaggtccc

SEQ ID NO: 8283 - DNA, 23 bp, synthetic construct
  source 1..23: mol_type = other DNA
gggtcgccgggggtcagaggtcc

SEQ ID NO: 8284 - DNA, 23 bp, synthetic construct
  source 1..23: mol_type = other DNA
ggggtcgccgggggtcagaggtc

SEQ ID NO: 8285 - DNA, 23 bp, synthetic construct
  source 1..23: mol_type = other DNA
aggggtcgccgggggtcagaggt

SEQ ID NO: 8286 - DNA, 23 bp, synthetic construct
  source 1..23: mol_type = other DNA
aaggggtcgccgggggtcagagg

SEQ ID NO: 8287 - DNA, 23 bp, synthetic construct
  source 1..23: mol_type = other DNA
caaggggtcgccgggggtcagag

SEQ ID NO: 8288 - DNA, 23 bp, synthetic construct
  source 1..23: mol_type = other DNA
gcaaggggtcgccgggggtcaga

SEQ ID NO: 8289 - DNA, 23 bp, synthetic construct
  source 1..23: mol_type = other DNA
tgcaaggggtcgccgggggtcag

SEQ ID NO: 8290 - DNA, 23 bp, synthetic construct
  source 1..23: mol_type = other DNA
gtgcaaggggtcgccgggggtca

SEQ ID NO: 8291 - DNA, 23 bp, synthetic construct
  source 1..23: mol_type = other DNA
agtgcaaggggtcgccgggggtc

SEQ ID NO: 8292 - DNA, 23 bp, synthetic construct
  source 1..23: mol_type = other DNA
gagtgcaaggggtcgccgggggt

SEQ ID NO: 8293 - DNA, 23 bp, synthetic construct
  source 1..23: mol_type = other DNA
agagtgcaaggggtcgccggggg

SEQ ID NO: 8294 - DNA, 23 bp, synthetic construct
  source 1..23: mol_type = other DNA
gagagtgcaaggggtcgccgggg

SEQ ID NO: 8295 - DNA, 23 bp, synthetic construct
  source 1..23: mol_type = other DNA
ggagagtgcaaggggtcgccggg

SEQ ID NO: 8296 - DNA, 23 bp, synthetic construct
  source 1..23: mol_type = other DNA
tggagagtgcaaggggtcgccgg

SEQ ID NO: 8297 - DNA, 23 bp, synthetic construct
  source 1..23: mol_type = other DNA
atggagagtgcaaggggtcgccg

SEQ ID NO: 8298 - DNA, 23 bp, synthetic construct
  source 1..23: mol_type = other DNA
catggagagtgcaaggggtcgcc

SEQ ID NO: 8299 - DNA, 23 bp, synthetic construct
  source 1..23: mol_type = other DNA
tcatggagagtgcaaggggtcgc

SEQ ID NO: 8300 - DNA, 23 bp, synthetic construct
  source 1..23: mol_type = other DNA
gtcatggagagtgcaaggggtcg

SEQ ID NO: 8301 - DNA, 23 bp, synthetic construct
  source 1..23: mol_type = other DNA
tgtcatggagagtgcaaggggtc

SEQ ID NO: 8302 - DNA, 23 bp, synthetic construct
  source 1..23: mol_type = other DNA
gtgtcatggagagtgcaaggggt

SEQ ID NO: 8303 - DNA, 23 bp, synthetic construct
  source 1..23: mol_type = other DNA
agtgtcatggagagtgcaagggg

SEQ ID NO: 8304 - DNA, 23 bp, synthetic construct
  source 1..23: mol_type = other DNA
aagtgtcatggagagtgcaaggg

SEQ ID NO: 8305 - DNA, 23 bp, synthetic construct
  source 1..23: mol_type = other DNA
aaagtgtcatggagagtgcaagg

SEQ ID NO: 8306 - DNA, 23 bp, synthetic construct
  source 1..23: mol_type = other DNA
gaaagtgtcatggagagtgcaag

SEQ ID NO: 8307 - DNA, 23 bp, synthetic construct
  source 1..23: mol_type = other DNA
agaaagtgtcatggagagtgcaa

SEQ ID NO: 8308 - DNA, 23 bp, synthetic construct
  source 1..23: mol_type = other DNA
gagaaagtgtcatggagagtgca

SEQ ID NO: 8309 - DNA, 23 bp, synthetic construct
  source 1..23: mol_type = other DNA
agagaaagtgtcatggagagtgc

SEQ ID NO: 8310 - DNA, 23 bp, synthetic construct
  source 1..23: mol_type = other DNA
gagagaaagtgtcatggagagtg

SEQ ID NO: 8311 - DNA, 23 bp, synthetic construct
  source 1..23: mol_type = other DNA
ggagagaaagtgtcatggagagt

SEQ ID NO: 8312 - DNA, 23 bp, synthetic construct
  source 1..23: mol_type = other DNA
gggagagaaagtgtcatggagag

SEQ ID NO: 8313 - DNA, 23 bp, synthetic construct
  source 1..23: mol_type = other DNA
tgggagagaaagtgtcatggaga

SEQ ID NO: 8314 - DNA, 23 bp, synthetic construct
  source 1..23: mol_type = other DNA
atgggagagaaagtgtcatggag

SEQ ID NO: 8315 - DNA, 23 bp, synthetic construct
  source 1..23: mol_type = other DNA
catgggagagaaagtgtcatgga

SEQ ID NO: 8316 - DNA, 23 bp, synthetic construct
  source 1..23: mol_type = other DNA
ccatgggagagaaagtgtcatgg

SEQ ID NO: 8317 - DNA, 23 bp, synthetic construct
  source 1..23: mol_type = other DNA
accatgggagagaaagtgtcatg

SEQ ID NO: 8318 - DNA, 23 bp, synthetic construct
  source 1..23: mol_type = other DNA
caccatgggagagaaagtgtcat

SEQ ID NO: 8319 - DNA, 23 bp, synthetic construct
  source 1..23: mol_type = other DNA
ccaccatgggagagaaagtgtca

SEQ ID NO: 8320 - DNA, 23 bp, synthetic construct
  source 1..23: mol_type = other DNA
gccaccatgggagagaaagtgtc

SEQ ID NO: 8321 - DNA, 23 bp, synthetic construct
  source 1..23: mol_type = other DNA
tgccaccatgggagagaaagtgt

SEQ ID NO: 8322 - DNA, 23 bp, synthetic construct
  source 1..23: mol_type = other DNA
ctgccaccatgggagagaaagtg

SEQ ID NO: 8323 - DNA, 23 bp, Homo sapiens
  source 1..23: mol_type = genomic DNA
gagggtcattgctcggcccctcc

SEQ ID NO: 8324 - DNA, 23 bp, Homo sapiens
  source 1..23: mol_type = genomic DNA
agggtcattgctcggcccctccc

SEQ ID NO: 8325 - DNA, 23 bp, Homo sapiens
  source 1..23: mol_type = genomic DNA
gggtcattgctcggcccctccca

SEQ ID NO: 8326 - DNA, 23 bp, Homo sapiens
  source 1..23: mol_type = genomic DNA
ggtcattgctcggcccctcccat

SEQ ID NO: 8327 - DNA, 23 bp, Homo sapiens
  source 1..23: mol_type = genomic DNA
gtcattgctcggcccctcccatg

SEQ ID NO: 8328 - DNA, 23 bp, Homo sapiens
  source 1..23: mol_type = genomic DNA
tcattgctcggcccctcccatgc

SEQ ID NO: 8329 - DNA, 23 bp, Homo sapiens
  source 1..23: mol_type = genomic DNA
cattgctcggcccctcccatgcc

SEQ ID NO: 8330 - DNA, 23 bp, Homo sapiens
  source 1..23: mol_type = genomic DNA
attgctcggcccctcccatgcca

SEQ ID NO: 8331 - DNA, 23 bp, Homo sapiens
  source 1..23: mol_type = genomic DNA
ttgctcggcccctcccatgccac

SEQ ID NO: 8332 - DNA, 23 bp, Homo sapiens
  source 1..23: mol_type = genomic DNA
tgctcggcccctcccatgccact

SEQ ID NO: 8333 - DNA, 23 bp, Homo sapiens
  source 1..23: mol_type = genomic DNA
gctcggcccctcccatgccactt

SEQ ID NO: 8334 - DNA, 23 bp, Homo sapiens
  source 1..23: mol_type = genomic DNA
ctcggcccctcccatgccacttc

SEQ ID NO: 8335 - DNA, 23 bp, Homo sapiens
  source 1..23: mol_type = genomic DNA
tcggcccctcccatgccacttcc

SEQ ID NO: 8336 - DNA, 23 bp, Homo sapiens
  source 1..23: mol_type = genomic DNA
cggcccctcccatgccacttcca

SEQ ID NO: 8337 - DNA, 23 bp, Homo sapiens
  source 1..23: mol_type = genomic DNA
ggcccctcccatgccacttccac

SEQ ID NO: 8338 - DNA, 23 bp, Homo sapiens
  source 1..23: mol_type = genomic DNA
gcccctcccatgccacttccact

SEQ ID NO: 8339 - DNA, 23 bp, Homo sapiens
  source 1..23: mol_type = genomic DNA
cccctcccatgccacttccactc

SEQ ID NO: 8340 - DNA, 23 bp, Homo sapiens
  source 1..23: mol_type = genomic DNA
ccctcccatgccacttccactca

SEQ ID NO: 8341 - DNA, 23 bp, Homo sapiens
  source 1..23: mol_type = genomic DNA
cctcccatgccacttccactcac

SEQ ID NO: 8342 - DNA, 23 bp, Homo sapiens
  source 1..23: mol_type = genomic DNA
ctcccatgccacttccactcacc

SEQ ID NO: 8343 - DNA, 23 bp, Homo sapiens
  source 1..23: mol_type = genomic DNA
tcccatgccacttccactcacca

SEQ ID NO: 8344 - DNA, 23 bp, Homo sapiens
  source 1..23: mol_type = genomic DNA
cccatgccacttccactcaccat

SEQ ID NO: 8345 - DNA, 23 bp, Homo sapiens
  source 1..23: mol_type = genomic DNA
ccatgccacttccactcaccatt

SEQ ID NO: 8346 - DNA, 23 bp, Homo sapiens
  source 1..23: mol_type = genomic DNA
catgccacttccactcaccattc

SEQ ID NO: 8347 - DNA, 23 bp, Homo sapiens
  source 1..23: mol_type = genomic DNA
atgccacttccactcaccattcc

SEQ ID NO: 8348 - DNA, 23 bp, Homo sapiens
  source 1..23: mol_type = genomic DNA
tgccacttccactcaccattcct

SEQ ID NO: 8349 - DNA, 23 bp, Homo sapiens
  source 1..23: mol_type = genomic DNA
gccacttccactcaccattcctg

SEQ ID NO: 8350 - DNA, 23 bp, Homo sapiens
  source 1..23: mol_type = genomic DNA
ccacttccactcaccattcctgc

SEQ ID NO: 8351 - DNA, 23 bp, Homo sapiens
  source 1..23: mol_type = genomic DNA
cacttccactcaccattcctgcc

SEQ ID NO: 8352 - DNA, 23 bp, Homo sapiens
  source 1..23: mol_type = genomic DNA
acttccactcaccattcctgcct

SEQ ID NO: 8353 - DNA, 23 bp, Homo sapiens
  source 1..23: mol_type = genomic DNA
cttccactcaccattcctgcctg

SEQ ID NO: 8354 - DNA, 23 bp, Homo sapiens
  source 1..23: mol_type = genomic DNA
ttccactcaccattcctgcctgc

SEQ ID NO: 8355 - DNA, 23 bp, Homo sapiens
  source 1..23: mol_type = genomic DNA
tccactcaccattcctgcctgcc

SEQ ID NO: 8356 - DNA, 23 bp, Homo sapiens
  source 1..23: mol_type = genomic DNA
ccactcaccattcctgcctgccc

SEQ ID NO: 8357 - DNA, 23 bp, Homo sapiens
  source 1..23: mol_type = genomic DNA
cactcaccattcctgcctgccca

SEQ ID NO: 8358 - DNA, 23 bp, Homo sapiens
  source 1..23: mol_type = genomic DNA
actcaccattcctgcctgcccag

SEQ ID NO: 8359 - DNA, 23 bp, Homo sapiens
  source 1..23: mol_type = genomic DNA
ctcaccattcctgcctgcccagc

SEQ ID NO: 8360 - DNA, 23 bp, Homo sapiens
  source 1..23: mol_type = genomic DNA
tcaccattcctgcctgcccagct

SEQ ID NO: 8361 - DNA, 23 bp, Homo sapiens
  source 1..23: mol_type = genomic DNA
caccattcctgcctgcccagctc

SEQ ID NO: 8362 - DNA, 23 bp, Homo sapiens
  source 1..23: mol_type = genomic DNA
accattcctgcctgcccagctct

SEQ ID NO: 8363 - DNA, 23 bp, Homo sapiens
  source 1..23: mol_type = genomic DNA
ccattcctgcctgcccagctctt

SEQ ID NO: 8364 - DNA, 23 bp, Homo sapiens
  source 1..23: mol_type = genomic DNA
cattcctgcctgcccagctcttc

SEQ ID NO: 8365 - DNA, 23 bp, Homo sapiens
  source 1..23: mol_type = genomic DNA
attcctgcctgcccagctcttcc

SEQ ID NO: 8366 - DNA, 23 bp, Homo sapiens
  source 1..23: mol_type = genomic DNA
ttcctgcctgcccagctcttcct

SEQ ID NO: 8367 - DNA, 23 bp, Homo sapiens
  source 1..23: mol_type = genomic DNA
tcctgcctgcccagctcttcctc

SEQ ID NO: 8368 - DNA, 23 bp, Homo sapiens
  source 1..23: mol_type = genomic DNA
cctgcctgcccagctcttcctct

SEQ ID NO: 8369 - DNA, 23 bp, Homo sapiens
  source 1..23: mol_type = genomic DNA
ctgcctgcccagctcttcctctt

SEQ ID NO: 8370 - DNA, 23 bp, Homo sapiens
  source 1..23: mol_type = genomic DNA
tgcctgcccagctcttcctcttt

SEQ ID NO: 8371 - DNA, 23 bp, Homo sapiens
  source 1..23: mol_type = genomic DNA
gcctgcccagctcttcctctttc

SEQ ID NO: 8372 - DNA, 23 bp, Homo sapiens
  source 1..23: mol_type = genomic DNA
cctgcccagctcttcctctttct

SEQ ID NO: 8373 - DNA, 23 bp, Homo sapiens
  source 1..23: mol_type = genomic DNA
ctgcccagctcttcctctttctg

SEQ ID NO: 8374 - DNA, 23 bp, Homo sapiens
  source 1..23: mol_type = genomic DNA
tgcccagctcttcctctttctgg

SEQ ID NO: 8375 - DNA, 23 bp, Homo sapiens
  source 1..23: mol_type = genomic DNA
gcccagctcttcctctttctggc

SEQ ID NO: 8376 - DNA, 23 bp, Homo sapiens
  source 1..23: mol_type = genomic DNA
cccagctcttcctctttctggcc

SEQ ID NO: 8377 - DNA, 23 bp, Homo sapiens
  source 1..23: mol_type = genomic DNA
ccagctcttcctctttctggcca

SEQ ID NO: 8378 - DNA, 23 bp, Homo sapiens
  source 1..23: mol_type = genomic DNA
cagctcttcctctttctggccac

SEQ ID NO: 8379 - DNA, 23 bp, Homo sapiens
  source 1..23: mol_type = genomic DNA
agctcttcctctttctggccaca

SEQ ID NO: 8380 - DNA, 23 bp, Homo sapiens
  source 1..23: mol_type = genomic DNA
gctcttcctctttctggccacac

SEQ ID NO: 8381 - DNA, 23 bp, Homo sapiens
  source 1..23: mol_type = genomic DNA
ctcttcctctttctggccacacc

SEQ ID NO: 8382 - DNA, 23 bp, Homo sapiens
  source 1..23: mol_type = genomic DNA
tcttcctctttctggccacacca

SEQ ID NO: 8383 - DNA, 23 bp, Homo sapiens
  source 1..23: mol_type = genomic DNA
cttcctctttctggccacaccat

SEQ ID NO: 8384 - DNA, 23 bp, Homo sapiens
  source 1..23: mol_type = genomic DNA
ttcctctttctggccacaccatc

SEQ ID NO: 8385 - DNA, 23 bp, Homo sapiens
  source 1..23: mol_type = genomic DNA
tcctctttctggccacaccatcc

SEQ ID NO: 8386 - DNA, 23 bp, Homo sapiens
  source 1..23: mol_type = genomic DNA
cctctttctggccacaccatcca

SEQ ID NO: 8387 - DNA, 23 bp, Homo sapiens
  source 1..23: mol_type = genomic DNA
ctctttctggccacaccatccac

SEQ ID NO: 8388 - DNA, 23 bp, Homo sapiens
  source 1..23: mol_type = genomic DNA
tctttctggccacaccatccaca

SEQ ID NO: 8389 - DNA, 23 bp, Homo sapiens
  source 1..23: mol_type = genomic DNA
ctttctggccacaccatccacac

SEQ ID NO: 8390 - DNA, 23 bp, Homo sapiens
  source 1..23: mol_type = genomic DNA
tttctggccacaccatccacact

SEQ ID NO: 8391 - DNA, 23 bp, Homo sapiens
  source 1..23: mol_type = genomic DNA
ttctggccacaccatccacactc

SEQ ID NO: 8392 - DNA, 23 bp, Homo sapiens
  source 1..23: mol_type = genomic DNA
tctggccacaccatccacactct

SEQ ID NO: 8393 - DNA, 23 bp, Homo sapiens
  source 1..23: mol_type = genomic DNA
ctggccacaccatccacactctc

SEQ ID NO: 8394 - DNA, 23 bp, Homo sapiens
  source 1..23: mol_type = genomic DNA
tggccacaccatccacactctcc

SEQ ID NO: 8395 - DNA, 23 bp, Homo sapiens
  source 1..23: mol_type = genomic DNA
ggccacaccatccacactctcct

SEQ ID NO: 8396 - DNA, 23 bp, Homo sapiens
  source 1..23: mol_type = genomic DNA
gccacaccatccacactctcctg

SEQ ID NO: 8397 - DNA, 23 bp, Homo sapiens
  source 1..23: mol_type = genomic DNA
ccacaccatccacactctcctgg

SEQ ID NO: 8398 - DNA, 23 bp, Homo sapiens
  source 1..23: mol_type = genomic DNA
cacaccatccacactctcctggc

SEQ ID NO: 8399 - DNA, 23 bp, Homo sapiens
  source 1..23: mol_type = genomic DNA
acaccatccacactctcctggcc

SEQ ID NO: 8400 - DNA, 23 bp, Homo sapiens
  source 1..23: mol_type = genomic DNA
caccatccacactctcctggccc

SEQ ID NO: 8401 - DNA, 23 bp, Homo sapiens
  source 1..23: mol_type = genomic DNA
accatccacactctcctggccct

SEQ ID NO: 8402 - DNA, 23 bp, Homo sapiens
  source 1..23: mol_type = genomic DNA
ccatccacactctcctggccctc

SEQ ID NO: 8403 - DNA, 23 bp, Homo sapiens
  source 1..23: mol_type = genomic DNA
catccacactctcctggccctct

SEQ ID NO: 8404 - DNA, 23 bp, Homo sapiens
  source 1..23: mol_type = genomic DNA
atccacactctcctggccctctg

SEQ ID NO: 8405 - DNA, 23 bp, Homo sapiens
  source 1..23: mol_type = genomic DNA
tccacactctcctggccctctga

SEQ ID NO: 8406 - DNA, 23 bp, Homo sapiens
  source 1..23: mol_type = genomic DNA
ccacactctcctggccctctgag

SEQ ID NO: 8407 - DNA, 23 bp, Homo sapiens
  source 1..23: mol_type = genomic DNA
cacactctcctggccctctgaga

SEQ ID NO: 8408 - DNA, 23 bp, Homo sapiens
  source 1..23: mol_type = genomic DNA
acactctcctggccctctgagac

SEQ ID NO: 8409 - DNA, 23 bp, Homo sapiens
  source 1..23: mol_type = genomic DNA
cactctcctggccctctgagact

SEQ ID NO: 8410 - DNA, 23 bp, Homo sapiens
  source 1..23: mol_type = genomic DNA
actctcctggccctctgagactg

SEQ ID NO: 8411 - DNA, 23 bp, Homo sapiens
  source 1..23: mol_type = genomic DNA
ctctcctggccctctgagactgc

SEQ ID NO: 8412 - DNA, 23 bp, Homo sapiens
  source 1..23: mol_type = genomic DNA
tctcctggccctctgagactgcc

SEQ ID NO: 8413 - DNA, 23 bp, Homo sapiens
  source 1..23: mol_type = genomic DNA
ctcctggccctctgagactgccc

SEQ ID NO: 8414 - DNA, 23 bp, Homo sapiens
  source 1..23: mol_type = genomic DNA
tcctggccctctgagactgcccg

SEQ ID NO: 8415 - DNA, 23 bp, Homo sapiens
  source 1..23: mol_type = genomic DNA
cctggccctctgagactgcccgc

SEQ ID NO: 8416 - DNA, 23 bp, Homo sapiens
  source 1..23: mol_type = genomic DNA
ctggccctctgagactgcccgcc

SEQ ID NO: 8417 - DNA, 23 bp, Homo sapiens
  source 1..23: mol_type = genomic DNA
tggccctctgagactgcccgcca

SEQ ID NO: 8418 - DNA, 23 bp, Homo sapiens
  source 1..23: mol_type = genomic DNA
ggccctctgagactgcccgccat

SEQ ID NO: 8419 - DNA, 23 bp, Homo sapiens
  source 1..23: mol_type = genomic DNA
gccctctgagactgcccgccatg

SEQ ID NO: 8420 - DNA, 23 bp, Homo sapiens
  source 1..23: mol_type = genomic DNA
ccctctgagactgcccgccatgc

SEQ ID NO: 8421 - DNA, 23 bp, Homo sapiens
  source 1..23: mol_type = genomic DNA
cctctgagactgcccgccatgcc

SEQ ID NO: 8422 - DNA, 23 bp, Homo sapiens
  source 1..23: mol_type = genomic DNA
ctctgagactgcccgccatgcca

SEQ ID NO: 8423 - DNA, 23 bp, Homo sapiens
  source 1..23: mol_type = genomic DNA
tctgagactgcccgccatgccat

SEQ ID NO: 8424 - DNA, 23 bp, Homo sapiens
  source 1..23: mol_type = genomic DNA
ctgagactgcccgccatgccatt

SEQ ID NO: 8425 - DNA, 23 bp, Homo sapiens
  source 1..23: mol_type = genomic DNA
tgagactgcccgccatgccattc

SEQ ID NO: 8426 - DNA, 23 bp, Homo sapiens
  source 1..23: mol_type = genomic DNA
gagactgcccgccatgccattcc

SEQ ID NO: 8427 - DNA, 23 bp, Homo sapiens
  source 1..23: mol_type = genomic DNA
agactgcccgccatgccattccc

SEQ ID NO: 8428 - DNA, 23 bp, Homo sapiens
  source 1..23: mol_type = genomic DNA
gactgcccgccatgccattccct

SEQ ID NO: 8429 - DNA, 23 bp, Homo sapiens
  source 1..23: mol_type = genomic DNA
actgcccgccatgccattccctt

SEQ ID NO: 8430 - DNA, 23 bp, Homo sapiens
  source 1..23: mol_type = genomic DNA
ctgcccgccatgccattcccttt

SEQ ID NO: 8431 - DNA, 23 bp, Homo sapiens
  source 1..23: mol_type = genomic DNA
tgcccgccatgccattcccttta

SEQ ID NO: 8432 - DNA, 23 bp, Homo sapiens
  source 1..23: mol_type = genomic DNA
gcccgccatgccattccctttac

SEQ ID NO: 8433 - DNA, 23 bp, Homo sapiens
  source 1..23: mol_type = genomic DNA
cccgccatgccattccctttacc

SEQ ID NO: 8434 - DNA, 23 bp, Homo sapiens
  source 1..23: mol_type = genomic DNA
ccgccatgccattccctttacct

SEQ ID NO: 8435 - DNA, 23 bp, Homo sapiens
  source 1..23: mol_type = genomic DNA
cgccatgccattccctttacctg

SEQ ID NO: 8436 - DNA, 23 bp, Homo sapiens
  source 1..23: mol_type = genomic DNA
gccatgccattccctttacctgg

SEQ ID NO: 8437 - DNA, 23 bp, Homo sapiens
  source 1..23: mol_type = genomic DNA
ccatgccattccctttacctgga

SEQ ID NO: 8438 - DNA, 23 bp, Homo sapiens
  source 1..23: mol_type = genomic DNA
catgccattccctttacctggaa

SEQ ID NO: 8439 - DNA, 23 bp, Homo sapiens
  source 1..23: mol_type = genomic DNA
atgccattccctttacctggaaa

SEQ ID NO: 8440 - DNA, 23 bp, Homo sapiens
  source 1..23: mol_type = genomic DNA
tgccattccctttacctggaaaa

SEQ ID NO: 8441 - DNA, 23 bp, Homo sapiens
  source 1..23: mol_type = genomic DNA
gccattccctttacctggaaaac

SEQ ID NO: 8442 - DNA, 23 bp, Homo sapiens
  source 1..23: mol_type = genomic DNA
ccattccctttacctggaaaact

SEQ ID NO: 8443 - DNA, 23 bp, Homo sapiens
  source 1..23: mol_type = genomic DNA
cattccctttacctggaaaactc

SEQ ID NO: 8444 - DNA, 23 bp, Homo sapiens
  source 1..23: mol_type = genomic DNA
attccctttacctggaaaactcc

SEQ ID NO: 8445 - DNA, 23 bp, Homo sapiens
  source 1..23: mol_type = genomic DNA
ttccctttacctggaaaactcct

SEQ ID NO: 8446 - DNA, 23 bp, Homo sapiens
  source 1..23: mol_type = genomic DNA
tccctttacctggaaaactcctc

SEQ ID NO: 8447 - DNA, 23 bp, Homo sapiens
  source 1..23: mol_type = genomic DNA
ccctttacctggaaaactcctcc

SEQ ID NO: 8448 - DNA, 23 bp, Homo sapiens
  source 1..23: mol_type = genomic DNA
cctttacctggaaaactcctccc

SEQ ID NO: 8449 - DNA, 23 bp, Homo sapiens
  source 1..23: mol_type = genomic DNA
ctttacctggaaaactcctccct

SEQ ID NO: 8450 - DNA, 23 bp, Homo sapiens
  source 1..23: mol_type = genomic DNA
tttacctggaaaactcctcccta

SEQ ID NO: 8451 - DNA, 23 bp, Homo sapiens
  source 1..23: mol_type = genomic DNA
ttacctggaaaactcctccctat

SEQ ID NO: 8452 - DNA, 23 bp, Homo sapiens
  source 1..23: mol_type = genomic DNA
tacctggaaaactcctccctatc

SEQ ID NO: 8453 - DNA, 23 bp, Homo sapiens
  source 1..23: mol_type = genomic DNA
acctggaaaactcctccctatcc

SEQ ID NO: 8454 - DNA, 23 bp, Homo sapiens
  source 1..23: mol_type = genomic DNA
cctggaaaactcctccctatcca

SEQ ID NO: 8455 - DNA, 23 bp, Homo sapiens
  source 1..23: mol_type = genomic DNA
ctggaaaactcctccctatccat

SEQ ID NO: 8456 - DNA, 23 bp, Homo sapiens
  source 1..23: mol_type = genomic DNA
tggaaaactcctccctatccatc

SEQ ID NO: 8457 - DNA, 23 bp, Homo sapiens
  source 1..23: mol_type = genomic DNA
ggaaaactcctccctatccatca

SEQ ID NO: 8458 - DNA, 23 bp, Homo sapiens
  source 1..23: mol_type = genomic DNA
gaaaactcctccctatccatcaa

SEQ ID NO: 8459 - DNA, 23 bp, Homo sapiens
  source 1..23: mol_type = genomic DNA
aaaactcctccctatccatcaaa

SEQ ID NO: 8460 - DNA, 23 bp, Homo sapiens
  source 1..23: mol_type = genomic DNA
aaactcctccctatccatcaaag

SEQ ID NO: 8461 - DNA, 23 bp, Homo sapiens
  source 1..23: mol_type = genomic DNA
aactcctccctatccatcaaagt

SEQ ID NO: 8462 - DNA, 23 bp, Homo sapiens
  source 1..23: mol_type = genomic DNA
actcctccctatccatcaaagtc

SEQ ID NO: 8463 - DNA, 23 bp, Homo sapiens
  source 1..23: mol_type = genomic DNA
ctcctccctatccatcaaagtcc

SEQ ID NO: 8464 - DNA, 23 bp, Homo sapiens
  source 1..23: mol_type = genomic DNA
tcctccctatccatcaaagtcca

SEQ ID NO: 8465 - DNA, 23 bp, Homo sapiens
  source 1..23: mol_type = genomic DNA
cctccctatccatcaaagtccag

SEQ ID NO: 8466 - DNA, 23 bp, Homo sapiens
  source 1..23: mol_type = genomic DNA
ctccctatccatcaaagtccaga

SEQ ID NO: 8467 - DNA, 23 bp, Homo sapiens
  source 1..23: mol_type = genomic DNA
tccctatccatcaaagtccagat

SEQ ID NO: 8468 - DNA, 23 bp, Homo sapiens
  source 1..23: mol_type = genomic DNA
ccctatccatcaaagtccagatt

SEQ ID NO: 8469 - DNA, 23 bp, Homo sapiens
  source 1..23: mol_type = genomic DNA
cctatccatcaaagtccagattc

SEQ ID NO: 8470 - DNA, 23 bp, Homo sapiens
  source 1..23: mol_type = genomic DNA
ctatccatcaaagtccagattca

SEQ ID NO: 8471 - DNA, 23 bp, Homo sapiens
  source 1..23: mol_type = genomic DNA
tatccatcaaagtccagattcag

SEQ ID NO: 8472 - DNA, 23 bp, Homo sapiens
  source 1..23: mol_type = genomic DNA
atccatcaaagtccagattcagg

SEQ ID NO: 8473 - DNA, 23 bp, Homo sapiens
  source 1..23: mol_type = genomic DNA
tccatcaaagtccagattcaggg

SEQ ID NO: 8474 - DNA, 23 bp, Homo sapiens
  source 1..23: mol_type = genomic DNA
ccatcaaagtccagattcagggt

SEQ ID NO: 8475 - DNA, 23 bp, Homo sapiens
  source 1..23: mol_type = genomic DNA
catcaaagtccagattcagggtc

SEQ ID NO: 8476 - DNA, 23 bp, Homo sapiens
  source 1..23: mol_type = genomic DNA
atcaaagtccagattcagggtca

SEQ ID NO: 8477 - DNA, 23 bp, Homo sapiens
  source 1..23: mol_type = genomic DNA
tcaaagtccagattcagggtcac

SEQ ID NO: 8478 - DNA, 23 bp, Homo sapiens
  source 1..23: mol_type = genomic DNA
caaagtccagattcagggtcacc

SEQ ID NO: 8479 - DNA, 23 bp, Homo sapiens
  source 1..23: mol_type = genomic DNA
aaagtccagattcagggtcacct

SEQ ID NO: 8480 - DNA, 23 bp, Homo sapiens
  source 1..23: mol_type = genomic DNA
aagtccagattcagggtcacctc

SEQ ID NO: 8481 - DNA, 23 bp, Homo sapiens
  source 1..23: mol_type = genomic DNA
agtccagattcagggtcacctcc

SEQ ID NO: 8482 - DNA, 23 bp, Homo sapiens
  source 1..23: mol_type = genomic DNA
gtccagattcagggtcacctcct

SEQ ID NO: 8483 - DNA, 23 bp, Homo sapiens
  source 1..23: mol_type = genomic DNA
tccagattcagggtcacctcctc

SEQ ID NO: 8484 - DNA, 23 bp, Homo sapiens
  source 1..23: mol_type = genomic DNA
ccagattcagggtcacctcctct

SEQ ID NO: 8485 - DNA, 23 bp, Homo sapiens
  source 1..23: mol_type = genomic DNA
cagattcagggtcacctcctctg

SEQ ID NO: 8486 - DNA, 23 bp, Homo sapiens
  source 1..23: mol_type = genomic DNA
agattcagggtcacctcctctgg

SEQ ID NO: 8487 - DNA, 23 bp, Homo sapiens
  source 1..23: mol_type = genomic DNA
gattcagggtcacctcctctggg

SEQ ID NO: 8488 - DNA, 23 bp, Homo sapiens
  source 1..23: mol_type = genomic DNA
attcagggtcacctcctctggga

SEQ ID NO: 8489 - DNA, 23 bp, Homo sapiens
  source 1..23: mol_type = genomic DNA
ttcagggtcacctcctctgggaa

SEQ ID NO: 8490 - DNA, 23 bp, Homo sapiens
  source 1..23: mol_type = genomic DNA
tcagggtcacctcctctgggaag

SEQ ID NO: 8491 - DNA, 23 bp, Homo sapiens
  source 1..23: mol_type = genomic DNA
cagggtcacctcctctgggaagc

SEQ ID NO: 8492 - DNA, 23 bp, Homo sapiens
  source 1..23: mol_type = genomic DNA
agggtcacctcctctgggaagcc

SEQ ID NO: 8493 - DNA, 23 bp, Homo sapiens
  source 1..23: mol_type = genomic DNA
gggtcacctcctctgggaagccc

SEQ ID NO: 8494 - DNA, 23 bp, Homo sapiens
  source 1..23: mol_type = genomic DNA
ggtcacctcctctgggaagccca

SEQ ID NO: 8495 - DNA, 23 bp, Homo sapiens
  source 1..23: mol_type = genomic DNA
gtcacctcctctgggaagcccac

SEQ ID NO: 8496 - DNA, 23 bp, Homo sapiens
  source 1..23: mol_type = genomic DNA
tcacctcctctgggaagcccacc

SEQ ID NO: 8497 - DNA, 23 bp, Homo sapiens
  source 1..23: mol_type = genomic DNA
cacctcctctgggaagcccacct

SEQ ID NO: 8498 - DNA, 23 bp, Homo sapiens
  source 1..23: mol_type = genomic DNA
acctcctctgggaagcccacctt

SEQ ID NO: 8499 - DNA, 23 bp, Homo sapiens
  source 1..23: mol_type = genomic DNA
cctcctctgggaagcccaccttg

SEQ ID NO: 8500 - DNA, 23 bp, Homo sapiens
  source 1..23: mol_type = genomic DNA
ctcctctgggaagcccaccttgg

SEQ ID NO: 8501 - DNA, 23 bp, Homo sapiens
  source 1..23: mol_type = genomic DNA
tcctctgggaagcccaccttggc

SEQ ID NO: 8502 - DNA, 23 bp, Homo sapiens
  source 1..23: mol_type = genomic DNA
cctctgggaagcccaccttggcc

SEQ ID NO: 8503 - DNA, 23 bp, Homo sapiens
  source 1..23: mol_type = genomic DNA
ctctgggaagcccaccttggcct

SEQ ID NO: 8504 - DNA, 23 bp, Homo sapiens
  source 1..23: mol_type = genomic DNA
tctgggaagcccaccttggcctc

SEQ ID NO: 8505 - DNA, 23 bp, Homo sapiens
  source 1..23: mol_type = genomic DNA
ctgggaagcccaccttggcctcc

SEQ ID NO: 8506 - DNA, 23 bp, Homo sapiens
  source 1..23: mol_type = genomic DNA
tgggaagcccaccttggcctcca

SEQ ID NO: 8507 - DNA, 23 bp, Homo sapiens
  source 1..23: mol_type = genomic DNA
gggaagcccaccttggcctccag

SEQ ID NO: 8508 - DNA, 23 bp, Homo sapiens
  source 1..23: mol_type = genomic DNA
ggaagcccaccttggcctccagg

SEQ ID NO: 8509 - DNA, 23 bp, Homo sapiens
  source 1..23: mol_type = genomic DNA
gaagcccaccttggcctccaggt

SEQ ID NO: 8510 - DNA, 23 bp, Homo sapiens
  source 1..23: mol_type = genomic DNA
aagcccaccttggcctccaggtt

SEQ ID NO: 8511 - DNA, 23 bp, Homo sapiens
  source 1..23: mol_type = genomic DNA
agcccaccttggcctccaggttg

SEQ ID NO: 8512 - DNA, 23 bp, Homo sapiens
  source 1..23: mol_type = genomic DNA
gcccaccttggcctccaggttga

SEQ ID NO: 8513 - DNA, 23 bp, Homo sapiens
  source 1..23: mol_type = genomic DNA
cccaccttggcctccaggttgac

SEQ ID NO: 8514 - DNA, 23 bp, Homo sapiens
  source 1..23: mol_type = genomic DNA
ccaccttggcctccaggttgact

SEQ ID NO: 8515 - DNA, 23 bp, Homo sapiens
  source 1..23: mol_type = genomic DNA
caccttggcctccaggttgactc

SEQ ID NO: 8516 - DNA, 23 bp, Homo sapiens
  source 1..23: mol_type = genomic DNA
accttggcctccaggttgactct

SEQ ID NO: 8517 - DNA, 23 bp, Homo sapiens
  source 1..23: mol_type = genomic DNA
ccttggcctccaggttgactctc

SEQ ID NO: 8518 - DNA, 23 bp, Homo sapiens
  source 1..23: mol_type = genomic DNA
cttggcctccaggttgactctca

SEQ ID NO: 8519 - DNA, 23 bp, Homo sapiens
  source 1..23: mol_type = genomic DNA
ttggcctccaggttgactctcac

SEQ ID NO: 8520 - DNA, 23 bp, Homo sapiens
  source 1..23: mol_type = genomic DNA
tggcctccaggttgactctcact

SEQ ID NO: 8521 - DNA, 23 bp, Homo sapiens
  source 1..23: mol_type = genomic DNA
ggcctccaggttgactctcacta

SEQ ID NO: 8522 - DNA, 23 bp, Homo sapiens
  source 1..23: mol_type = genomic DNA
gcctccaggttgactctcactac

SEQ ID NO: 8523 - DNA, 23 bp, Homo sapiens
  source 1..23: mol_type = genomic DNA
cctccaggttgactctcactact

SEQ ID NO: 8524 - DNA, 23 bp, Homo sapiens
  source 1..23: mol_type = genomic DNA
ctccaggttgactctcactactc

SEQ ID NO: 8525 - DNA, 23 bp, Homo sapiens
  source 1..23: mol_type = genomic DNA
tccaggttgactctcactactca

SEQ ID NO: 8526 - DNA, 23 bp, Homo sapiens
  source 1..23: mol_type = genomic DNA
ccaggttgactctcactactcat

SEQ ID NO: 8527 - DNA, 23 bp, Homo sapiens
  source 1..23: mol_type = genomic DNA
caggttgactctcactactcatc

SEQ ID NO: 8528 - DNA, 23 bp, Homo sapiens
  source 1..23: mol_type = genomic DNA
aggttgactctcactactcatca

SEQ ID NO: 8529 - DNA, 23 bp, Homo sapiens
  source 1..23: mol_type = genomic DNA
ggttgactctcactactcatcat

SEQ ID NO: 8530 - DNA, 23 bp, Homo sapiens
  source 1..23: mol_type = genomic DNA
gttgactctcactactcatcatc

SEQ ID NO: 8531 - DNA, 23 bp, Homo sapiens
  source 1..23: mol_type = genomic DNA
ttgactctcactactcatcatca

SEQ ID NO: 8532 - DNA, 23 bp, Homo sapiens
  source 1..23: mol_type = genomic DNA
tgactctcactactcatcatcag

SEQ ID NO: 8533 - DNA, 23 bp, Homo sapiens
  source 1..23: mol_type = genomic DNA
gactctcactactcatcatcagg

SEQ ID NO: 8534 - DNA, 23 bp, Homo sapiens
  source 1..23: mol_type = genomic DNA
actctcactactcatcatcaggt

SEQ ID NO: 8535 - DNA, 23 bp, Homo sapiens
  source 1..23: mol_type = genomic DNA
ctctcactactcatcatcaggtt

SEQ ID NO: 8536 - DNA, 23 bp, Homo sapiens
  source 1..23: mol_type = genomic DNA
tctcactactcatcatcaggttc

SEQ ID NO: 8537 - DNA, 23 bp, Homo sapiens
  source 1..23: mol_type = genomic DNA
ctcactactcatcatcaggttct

SEQ ID NO: 8538 - DNA, 23 bp, Homo sapiens
  source 1..23: mol_type = genomic DNA
tcactactcatcatcaggttctt

SEQ ID NO: 8539 - DNA, 23 bp, Homo sapiens
  source 1..23: mol_type = genomic DNA
cactactcatcatcaggttcttc

SEQ ID NO: 8540 - DNA, 23 bp, Homo sapiens
  source 1..23: mol_type = genomic DNA
actactcatcatcaggttcttcc

SEQ ID NO: 8541 - DNA, 23 bp, Homo sapiens
  source 1..23: mol_type = genomic DNA
ctactcatcatcaggttcttcct

SEQ ID NO: 8542 - DNA, 23 bp, Homo sapiens
  source 1..23: mol_type = genomic DNA
tactcatcatcaggttcttcctt

SEQ ID NO: 8543 - DNA, 23 bp, Homo sapiens
  source 1..23: mol_type = genomic DNA
actcatcatcaggttcttccttc

SEQ ID NO: 8544 - DNA, 23 bp, Homo sapiens
  source 1..23: mol_type = genomic DNA
ctcatcatcaggttcttccttct

SEQ ID NO: 8545 - DNA, 23 bp, Homo sapiens
  source 1..23: mol_type = genomic DNA
tcatcatcaggttcttccttcta

SEQ ID NO: 8546 - DNA, 23 bp, Homo sapiens
  source 1..23: mol_type = genomic DNA
catcatcaggttcttccttctat

SEQ ID NO: 8547 - DNA, 23 bp, Homo sapiens
  source 1..23: mol_type = genomic DNA
atcatcaggttcttccttctatt

SEQ ID NO: 8548 - DNA, 23 bp, Homo sapiens
  source 1..23: mol_type = genomic DNA
tcatcaggttcttccttctattc

SEQ ID NO: 8549 - DNA, 23 bp, Homo sapiens
  source 1..23: mol_type = genomic DNA
catcaggttcttccttctattcc

SEQ ID NO: 8550 - DNA, 23 bp, Homo sapiens
  source 1..23: mol_type = genomic DNA
atcaggttcttccttctattcca

SEQ ID NO: 8551 - DNA, 23 bp, Homo sapiens
  source 1..23: mol_type = genomic DNA
tcaggttcttccttctattccag

SEQ ID NO: 8552 - DNA, 23 bp, Homo sapiens
  source 1..23: mol_type = genomic DNA
caggttcttccttctattccagc

SEQ ID NO: 8553 - DNA, 23 bp, Homo sapiens
  source 1..23: mol_type = genomic DNA
aggttcttccttctattccagcc

SEQ ID NO: 8554 - DNA, 23 bp, Homo sapiens
  source 1..23: mol_type = genomic DNA
ggttcttccttctattccagccc

SEQ ID NO: 8555 - DNA, 23 bp, Homo sapiens
  source 1..23: mol_type = genomic DNA
gttcttccttctattccagccct

SEQ ID NO: 8556 - DNA, 23 bp, Homo sapiens
  source 1..23: mol_type = genomic DNA
ttcttccttctattccagcccta

SEQ ID NO: 8557 - DNA, 23 bp, Homo sapiens
  source 1..23: mol_type = genomic DNA
tcttccttctattccagccctaa

SEQ ID NO: 8558 - DNA, 23 bp, Homo sapiens
  source 1..23: mol_type = genomic DNA
cttccttctattccagccctaac

SEQ ID NO: 8559 - DNA, 23 bp, Homo sapiens
  source 1..23: mol_type = genomic DNA
ttccttctattccagccctaacc

SEQ ID NO: 8560 - DNA, 23 bp, Homo sapiens
  source 1..23: mol_type = genomic DNA
tccttctattccagccctaacca

SEQ ID NO: 8561 - DNA, 23 bp, Homo sapiens
  source 1..23: mol_type = genomic DNA
ccttctattccagccctaaccac

SEQ ID NO: 8562 - DNA, 23 bp, Homo sapiens
  source 1..23: mol_type = genomic DNA
cttctattccagccctaaccact

SEQ ID NO: 8563 - DNA, 23 bp, Homo sapiens
  source 1..23: mol_type = genomic DNA
ttctattccagccctaaccactc

SEQ ID NO: 8564 - DNA, 23 bp, Homo sapiens
  source 1..23: mol_type = genomic DNA
tctattccagccctaaccactca

SEQ ID NO: 8565 - DNA, 23 bp, Homo sapiens
  source 1..23: mol_type = genomic DNA
ctattccagccctaaccactcag

SEQ ID NO: 8566 - DNA, 23 bp, Homo sapiens
  source 1..23: mol_type = genomic DNA
tattccagccctaaccactcagg

SEQ ID NO: 8567 - DNA, 23 bp, Homo sapiens
  source 1..23: mol_type = genomic DNA
attccagccctaaccactcagga

SEQ ID NO: 8568 - DNA, 23 bp, Homo sapiens
  source 1..23: mol_type = genomic DNA
ttccagccctaaccactcaggat

SEQ ID NO: 8569 - DNA, 23 bp, Homo sapiens
  source 1..23: mol_type = genomic DNA
tccagccctaaccactcaggatt

SEQ ID NO: 8570 - DNA, 23 bp, Homo sapiens
  source 1..23: mol_type = genomic DNA
ccagccctaaccactcaggattg

SEQ ID NO: 8571 - DNA, 23 bp, Homo sapiens
  source 1..23: mol_type = genomic DNA
cagccctaaccactcaggattgg

SEQ ID NO: 8572 - DNA, 23 bp, Homo sapiens
  source 1..23: mol_type = genomic DNA
agccctaaccactcaggattggg

SEQ ID NO: 8573 - DNA, 23 bp, Homo sapiens
  source 1..23: mol_type = genomic DNA
gccctaaccactcaggattgggc

SEQ ID NO: 8574 - DNA, 23 bp, Homo sapiens
  source 1..23: mol_type = genomic DNA
ccctaaccactcaggattgggcc

SEQ ID NO: 8575 - DNA, 23 bp, Homo sapiens
  source 1..23: mol_type = genomic DNA
cctaaccactcaggattgggccg

SEQ ID NO: 8576 - DNA, 23 bp, Homo sapiens
  source 1..23: mol_type = genomic DNA
ctaaccactcaggattgggccgt

SEQ ID NO: 8577 - DNA, 23 bp, Homo sapiens
  source 1..23: mol_type = genomic DNA
taaccactcaggattgggccgtt

SEQ ID NO: 8578 - DNA, 23 bp, Homo sapiens
  source 1..23: mol_type = genomic DNA
aaccactcaggattgggccgttt

SEQ ID NO: 8579 - DNA, 23 bp, Homo sapiens
  source 1..23: mol_type = genomic DNA
accactcaggattgggccgtttg

SEQ ID NO: 8580 - DNA, 23 bp, Homo sapiens
  source 1..23: mol_type = genomic DNA
ccactcaggattgggccgtttgt

SEQ ID NO: 8581 - DNA, 23 bp, Homo sapiens
  source 1..23: mol_type = genomic DNA
cactcaggattgggccgtttgtg

SEQ ID NO: 8582 - DNA, 23 bp, Homo sapiens
  source 1..23: mol_type = genomic DNA
actcaggattgggccgtttgtgt

SEQ ID NO: 8583 - DNA, 23 bp, Homo sapiens
  source 1..23: mol_type = genomic DNA
ctcaggattgggccgtttgtgtc

SEQ ID NO: 8584 - DNA, 23 bp, Homo sapiens
  source 1..23: mol_type = genomic DNA
tcaggattgggccgtttgtgtct

SEQ ID NO: 8585 - DNA, 23 bp, Homo sapiens
  source 1..23: mol_type = genomic DNA
caggattgggccgtttgtgtctg

SEQ ID NO: 8586 - DNA, 23 bp, Homo sapiens
  source 1..23: mol_type = genomic DNA
aggattgggccgtttgtgtctgg

SEQ ID NO: 8587 - DNA, 23 bp, Homo sapiens
  source 1..23: mol_type = genomic DNA
ggattgggccgtttgtgtctggg

SEQ ID NO: 8588 - DNA, 23 bp, Homo sapiens
  source 1..23: mol_type = genomic DNA
gattgggccgtttgtgtctgggt

SEQ ID NO: 8589 - DNA, 23 bp, Homo sapiens
  source 1..23: mol_type = genomic DNA
attgggccgtttgtgtctgggta

SEQ ID NO: 8590 - DNA, 23 bp, Homo sapiens
  source 1..23: mol_type = genomic DNA
ttgggccgtttgtgtctgggtat

SEQ ID NO: 8591 - DNA, 23 bp, Homo sapiens
  source 1..23: mol_type = genomic DNA
tgggccgtttgtgtctgggtatg

SEQ ID NO: 8592 - DNA, 23 bp, Homo sapiens
  source 1..23: mol_type = genomic DNA
gggccgtttgtgtctgggtatgt

SEQ ID NO: 8593 - DNA, 23 bp, Homo sapiens
  source 1..23: mol_type = genomic DNA
ggccgtttgtgtctgggtatgtc

SEQ ID NO: 8594 - DNA, 23 bp, Homo sapiens
  source 1..23: mol_type = genomic DNA
gccgtttgtgtctgggtatgtct

SEQ ID NO: 8595 - DNA, 23 bp, Homo sapiens
  source 1..23: mol_type = genomic DNA
ccgtttgtgtctgggtatgtctc

SEQ ID NO: 8596 - DNA, 23 bp, Homo sapiens
  source 1..23: mol_type = genomic DNA
cgtttgtgtctgggtatgtctct

SEQ ID NO: 8597 - DNA, 23 bp, Homo sapiens
  source 1..23: mol_type = genomic DNA
gtttgtgtctgggtatgtctctt

SEQ ID NO: 8598 - DNA, 23 bp, Homo sapiens
  source 1..23: mol_type = genomic DNA
tttgtgtctgggtatgtctcttc

SEQ ID NO: 8599 - DNA, 23 bp, Homo sapiens
  source 1..23: mol_type = genomic DNA
ttgtgtctgggtatgtctcttcc

SEQ ID NO: 8600 - DNA, 23 bp, Homo sapiens
  source 1..23: mol_type = genomic DNA
tgtgtctgggtatgtctcttcca

SEQ ID NO: 8601 - DNA, 23 bp, Homo sapiens
  source 1..23: mol_type = genomic DNA
gtgtctgggtatgtctcttccag

SEQ ID NO: 8602 - DNA, 23 bp, Homo sapiens
  source 1..23: mol_type = genomic DNA
tgtctgggtatgtctcttccagc

SEQ ID NO: 8603 - DNA, 23 bp, Homo sapiens
  source 1..23: mol_type = genomic DNA
gtctgggtatgtctcttccagct

SEQ ID NO: 8604 - DNA, 23 bp, Homo sapiens
  source 1..23: mol_type = genomic DNA
tctgggtatgtctcttccagctg

SEQ ID NO: 8605 - DNA, 23 bp, Homo sapiens
  source 1..23: mol_type = genomic DNA
ctgggtatgtctcttccagctgc

SEQ ID NO: 8606 - DNA, 23 bp, Homo sapiens
  source 1..23: mol_type = genomic DNA
tgggtatgtctcttccagctgcc

SEQ ID NO: 8607 - DNA, 23 bp, Homo sapiens
  source 1..23: mol_type = genomic DNA
gggtatgtctcttccagctgcct

SEQ ID NO: 8608 - DNA, 23 bp, Homo sapiens
  source 1..23: mol_type = genomic DNA
ggtatgtctcttccagctgcctg

SEQ ID NO: 8609 - DNA, 23 bp, Homo sapiens
  source 1..23: mol_type = genomic DNA
gtatgtctcttccagctgcctgg

SEQ ID NO: 8610 - DNA, 23 bp, Homo sapiens
  source 1..23: mol_type = genomic DNA
tatgtctcttccagctgcctggg

SEQ ID NO: 8611 - DNA, 23 bp, Homo sapiens
  source 1..23: mol_type = genomic DNA
atgtctcttccagctgcctgggt

SEQ ID NO: 8612 - DNA, 23 bp, Homo sapiens
  source 1..23: mol_type = genomic DNA
tgtctcttccagctgcctgggtt

SEQ ID NO: 8613 - DNA, 23 bp, Homo sapiens
  source 1..23: mol_type = genomic DNA
gtctcttccagctgcctgggttt

SEQ ID NO: 8614 - DNA, 23 bp, Homo sapiens
  source 1..23: mol_type = genomic DNA
tctcttccagctgcctgggtttc

SEQ ID NO: 8615 - DNA, 23 bp, Homo sapiens
  source 1..23: mol_type = genomic DNA
ctcttccagctgcctgggtttcc

SEQ ID NO: 8616 - DNA, 23 bp, Homo sapiens
  source 1..23: mol_type = genomic DNA
tcttccagctgcctgggtttcct

SEQ ID NO: 8617 - DNA, 23 bp, Homo sapiens
  source 1..23: mol_type = genomic DNA
cttccagctgcctgggtttcctg

SEQ ID NO: 8618 - DNA, 23 bp, Homo sapiens
  source 1..23: mol_type = genomic DNA
ttccagctgcctgggtttcctgg

SEQ ID NO: 8619 - DNA, 23 bp, Homo sapiens
  source 1..23: mol_type = genomic DNA
tccagctgcctgggtttcctgga

SEQ ID NO: 8620 - DNA, 23 bp, Homo sapiens
  source 1..23: mol_type = genomic DNA
ccagctgcctgggtttcctggaa

SEQ ID NO: 8621 - DNA, 23 bp, Homo sapiens
  source 1..23: mol_type = genomic DNA
cagctgcctgggtttcctggaaa

SEQ ID NO: 8622 - DNA, 23 bp, Homo sapiens
  source 1..23: mol_type = genomic DNA
agctgcctgggtttcctggaaag

SEQ ID NO: 8623 - DNA, 23 bp, Homo sapiens
  source 1..23: mol_type = genomic DNA
gctgcctgggtttcctggaaaga

SEQ ID NO: 8624 - DNA, 23 bp, Homo sapiens
  source 1..23: mol_type = genomic DNA
ctgcctgggtttcctggaaagaa

SEQ ID NO: 8625 - DNA, 23 bp, Homo sapiens
  source 1..23: mol_type = genomic DNA
tgcctgggtttcctggaaagaac

SEQ ID NO: 8626 - DNA, 23 bp, Homo sapiens
  source 1..23: mol_type = genomic DNA
gcctgggtttcctggaaagaact

SEQ ID NO: 8627 - DNA, 23 bp, Homo sapiens
  source 1..23: mol_type = genomic DNA
cctgggtttcctggaaagaactc

SEQ ID NO: 8628 - DNA, 23 bp, Homo sapiens
  source 1..23: mol_type = genomic DNA
ctgggtttcctggaaagaactct

SEQ ID NO: 8629 - DNA, 23 bp, Homo sapiens
  source 1..23: mol_type = genomic DNA
tgggtttcctggaaagaactctt

SEQ ID NO: 8630 - DNA, 23 bp, Homo sapiens
  source 1..23: mol_type = genomic DNA
gggtttcctggaaagaactctta

SEQ ID NO: 8631 - DNA, 23 bp, Homo sapiens
  source 1..23: mol_type = genomic DNA
ggtttcctggaaagaactcttat

SEQ ID NO: 8632 - DNA, 23 bp, Homo sapiens
  source 1..23: mol_type = genomic DNA
gtttcctggaaagaactcttatc

SEQ ID NO: 8633 - DNA, 23 bp, Homo sapiens
  source 1..23: mol_type = genomic DNA
tttcctggaaagaactcttatcc

SEQ ID NO: 8634 - DNA, 23 bp, Homo sapiens
  source 1..23: mol_type = genomic DNA
ttcctggaaagaactcttatccc

SEQ ID NO: 8635 - DNA, 23 bp, Homo sapiens
  source 1..23: mol_type = genomic DNA
tcctggaaagaactcttatcccc

SEQ ID NO: 8636 - DNA, 23 bp, Homo sapiens
  source 1..23: mol_type = genomic DNA
cctggaaagaactcttatcccca

SEQ ID NO: 8637 - DNA, 23 bp, Homo sapiens
  source 1..23: mol_type = genomic DNA
ctggaaagaactcttatccccag

SEQ ID NO: 8638 - DNA, 23 bp, Homo sapiens
  source 1..23: mol_type = genomic DNA
tggaaagaactcttatccccagg

SEQ ID NO: 8639 - DNA, 23 bp, Homo sapiens
  source 1..23: mol_type = genomic DNA
ggaaagaactcttatccccagga

SEQ ID NO: 8640 - DNA, 23 bp, Homo sapiens
  source 1..23: mol_type = genomic DNA
gaaagaactcttatccccaggaa

SEQ ID NO: 8641 - DNA, 23 bp, Homo sapiens
  source 1..23: mol_type = genomic DNA
aaagaactcttatccccaggaac

SEQ ID NO: 8642 - DNA, 23 bp, Homo sapiens
  source 1..23: mol_type = genomic DNA
aagaactcttatccccaggaact

SEQ ID NO: 8643 - DNA, 23 bp, Homo sapiens
  source 1..23: mol_type = genomic DNA
agaactcttatccccaggaacta

SEQ ID NO: 8644 - DNA, 23 bp, Homo sapiens
  source 1..23: mol_type = genomic DNA
gaactcttatccccaggaactag

SEQ ID NO: 8645 - DNA, 23 bp, Homo sapiens
  source 1..23: mol_type = genomic DNA
aactcttatccccaggaactagt

SEQ ID NO: 8646 - DNA, 23 bp, Homo sapiens
  source 1..23: mol_type = genomic DNA
actcttatccccaggaactagtt

SEQ ID NO: 8647 - DNA, 23 bp, Homo sapiens
  source 1..23: mol_type = genomic DNA
ctcttatccccaggaactagttt

SEQ ID NO: 8648 - DNA, 23 bp, Homo sapiens
  source 1..23: mol_type = genomic DNA
tcttatccccaggaactagtttg

SEQ ID NO: 8649 - DNA, 23 bp, Homo sapiens
  source 1..23: mol_type = genomic DNA
cttatccccaggaactagtttgt

SEQ ID NO: 8650 - DNA, 23 bp, Homo sapiens
  source 1..23: mol_type = genomic DNA
ttatccccaggaactagtttgtt

SEQ ID NO: 8651 - DNA, 23 bp, Homo sapiens
  source 1..23: mol_type = genomic DNA
tatccccaggaactagtttgttg

SEQ ID NO: 8652 - DNA, 23 bp, Homo sapiens
  source 1..23: mol_type = genomic DNA
atccccaggaactagtttgttga

SEQ ID NO: 8653 - DNA, 23 bp, Homo sapiens
  source 1..23: mol_type = genomic DNA
tccccaggaactagtttgttgaa

SEQ ID NO: 8654 - DNA, 23 bp, Homo sapiens
  source 1..23: mol_type = genomic DNA
ccccaggaactagtttgttgaat

SEQ ID NO: 8655 - DNA, 23 bp, Homo sapiens
  source 1..23: mol_type = genomic DNA
cccaggaactagtttgttgaata

SEQ ID NO: 8656 - DNA, 23 bp, Homo sapiens
  source 1..23: mol_type = genomic DNA
ccaggaactagtttgttgaataa

SEQ ID NO: 8657 - DNA, 23 bp, Homo sapiens
  source 1..23: mol_type = genomic DNA
caggaactagtttgttgaataaa

SEQ ID NO: 8658 - DNA, 23 bp, Homo sapiens
  source 1..23: mol_type = genomic DNA
aggaactagtttgttgaataaat

SEQ ID NO: 8659 - DNA, 23 bp, Homo sapiens
  source 1..23: mol_type = genomic DNA
ggaactagtttgttgaataaatg

SEQ ID NO: 8660 - DNA, 23 bp, Homo sapiens
  source 1..23: mol_type = genomic DNA
gaactagtttgttgaataaatgc

SEQ ID NO: 8661 - DNA, 23 bp, Homo sapiens
  source 1..23: mol_type = genomic DNA
aactagtttgttgaataaatgct

SEQ ID NO: 8662 - DNA, 23 bp, Homo sapiens
  source 1..23: mol_type = genomic DNA
actagtttgttgaataaatgctg

SEQ ID NO: 8663 - DNA, 23 bp, Homo sapiens
  source 1..23: mol_type = genomic DNA
ctagtttgttgaataaatgctgg

SEQ ID NO: 8664 - DNA, 23 bp, Homo sapiens
  source 1..23: mol_type = genomic DNA
tagtttgttgaataaatgctggt

SEQ ID NO: 8665 - DNA, 23 bp, Homo sapiens
  source 1..23: mol_type = genomic DNA
agtttgttgaataaatgctggtg

SEQ ID NO: 8666 - DNA, 23 bp, Homo sapiens
  source 1..23: mol_type = genomic DNA
gtttgttgaataaatgctggtga

SEQ ID NO: 8667 - DNA, 23 bp, Homo sapiens
  source 1..23: mol_type = genomic DNA
tttgttgaataaatgctggtgaa

SEQ ID NO: 8668 - DNA, 23 bp, Homo sapiens
  source 1..23: mol_type = genomic DNA
ttgttgaataaatgctggtgaat

SEQ ID NO: 8669 - DNA, 23 bp, Homo sapiens
  source 1..23: mol_type = genomic DNA
tgttgaataaatgctggtgaatg

SEQ ID NO: 8670 - DNA, 23 bp, Homo sapiens
  source 1..23: mol_type = genomic DNA
gttgaataaatgctggtgaatga

SEQ ID NO: 8671 - DNA, 23 bp, Homo sapiens
  source 1..23: mol_type = genomic DNA
ttgaataaatgctggtgaatgaa

SEQ ID NO: 8672 - DNA, 23 bp, Homo sapiens
  source 1..23: mol_type = genomic DNA
tgaataaatgctggtgaatgaat

SEQ ID NO: 8673 - DNA, 23 bp, Homo sapiens
  source 1..23: mol_type = genomic DNA
gaataaatgctggtgaatgaatg

SEQ ID NO: 8674 - DNA, 23 bp, Homo sapiens
  source 1..23: mol_type = genomic DNA
aataaatgctggtgaatgaatga

SEQ ID NO: 8675 - DNA, 23 bp, Homo sapiens
  source 1..23: mol_type = genomic DNA
ataaatgctggtgaatgaatgaa

SEQ ID NO: 8676 - DNA, 23 bp, Homo sapiens
  source 1..23: mol_type = genomic DNA
taaatgctggtgaatgaatgaat

SEQ ID NO: 8677 - DNA, 23 bp, Homo sapiens
  source 1..23: mol_type = genomic DNA
aaatgctggtgaatgaatgaatg

SEQ ID NO: 8678 - DNA, 23 bp, Homo sapiens
  source 1..23: mol_type = genomic DNA
aatgctggtgaatgaatgaatga

SEQ ID NO: 8679 - DNA, 23 bp, Homo sapiens
  source 1..23: mol_type = genomic DNA
atgctggtgaatgaatgaatgat

SEQ ID NO: 8680 - DNA, 23 bp, Homo sapiens
  source 1..23: mol_type = genomic DNA
tgctggtgaatgaatgaatgatt

SEQ ID NO: 8681 - DNA, 23 bp, Homo sapiens
  source 1..23: mol_type = genomic DNA
gctggtgaatgaatgaatgattg

SEQ ID NO: 8682 - DNA, 23 bp, Homo sapiens
  source 1..23: mol_type = genomic DNA
ctggtgaatgaatgaatgattga

SEQ ID NO: 8683 - DNA, 23 bp, Homo sapiens
  source 1..23: mol_type = genomic DNA
tggtgaatgaatgaatgattgaa

SEQ ID NO: 8684 - DNA, 23 bp, Homo sapiens
  source 1..23: mol_type = genomic DNA
ggtgaatgaatgaatgattgaac

SEQ ID NO: 8685 - DNA, 23 bp, Homo sapiens
  source 1..23: mol_type = genomic DNA
gtgaatgaatgaatgattgaaca

SEQ ID NO: 8686 - DNA, 23 bp, Homo sapiens
  source 1..23: mol_type = genomic DNA
tgaatgaatgaatgattgaacag

SEQ ID NO: 8687 - DNA, 23 bp, Homo sapiens
  source 1..23: mol_type = genomic DNA
gaatgaatgaatgattgaacaga

SEQ ID NO: 8688 - DNA, 23 bp, Homo sapiens
  source 1..23: mol_type = genomic DNA
aatgaatgaatgattgaacagat

SEQ ID NO: 8689 - DNA, 23 bp, Homo sapiens
  source 1..23: mol_type = genomic DNA
atgaatgaatgattgaacagatg

SEQ ID NO: 8690 - DNA, 23 bp, Homo sapiens
  source 1..23: mol_type = genomic DNA
tgaatgaatgattgaacagatga

SEQ ID NO: 8691 - DNA, 23 bp, Homo sapiens
  source 1..23: mol_type = genomic DNA
gaatgaatgattgaacagatgaa

SEQ ID NO: 8692 - DNA, 23 bp, Homo sapiens
  source 1..23: mol_type = genomic DNA
aatgaatgattgaacagatgaat

SEQ ID NO: 8693 - DNA, 23 bp, Homo sapiens
  source 1..23: mol_type = genomic DNA
atgaatgattgaacagatgaatg

SEQ ID NO: 8694 - DNA, 23 bp, Homo sapiens
  source 1..23: mol_type = genomic DNA
tgaatgattgaacagatgaatga

SEQ ID NO: 8695 - DNA, 23 bp, Homo sapiens
  source 1..23: mol_type = genomic DNA
gaatgattgaacagatgaatgag

SEQ ID NO: 8696 - DNA, 23 bp, Homo sapiens
  source 1..23: mol_type = genomic DNA
aatgattgaacagatgaatgagt

SEQ ID NO: 8697 - DNA, 23 bp, Homo sapiens
  source 1..23: mol_type = genomic DNA
atgattgaacagatgaatgagtg

SEQ ID NO: 8698 - DNA, 23 bp, Homo sapiens
  source 1..23: mol_type = genomic DNA
tgattgaacagatgaatgagtga

SEQ ID NO: 8699 - DNA, 23 bp, Homo sapiens
  source 1..23: mol_type = genomic DNA
gattgaacagatgaatgagtgat

SEQ ID NO: 8700 - DNA, 23 bp, Homo sapiens
  source 1..23: mol_type = genomic DNA
attgaacagatgaatgagtgatg

SEQ ID NO: 8701 - DNA, 23 bp, Homo sapiens
  source 1..23: mol_type = genomic DNA
ttgaacagatgaatgagtgatga

SEQ ID NO: 8702 - DNA, 23 bp, Homo sapiens
  source 1..23: mol_type = genomic DNA
tgaacagatgaatgagtgatgag

SEQ ID NO: 8703 - DNA, 23 bp, Homo sapiens
  source 1..23: mol_type = genomic DNA
gaacagatgaatgagtgatgagt

SEQ ID NO: 8704 - DNA, 23 bp, Homo sapiens
  source 1..23: mol_type = genomic DNA
aacagatgaatgagtgatgagta

SEQ ID NO: 8705 - DNA, 23 bp, Homo sapiens
  source 1..23: mol_type = genomic DNA
acagatgaatgagtgatgagtag

SEQ ID NO: 8706 - DNA, 23 bp, Homo sapiens
  source 1..23: mol_type = genomic DNA
cagatgaatgagtgatgagtaga

SEQ ID NO: 8707 - DNA, 23 bp, Homo sapiens
  source 1..23: mol_type = genomic DNA
agatgaatgagtgatgagtagat

SEQ ID NO: 8708 - DNA, 23 bp, Homo sapiens
  source 1..23: mol_type = genomic DNA
gatgaatgagtgatgagtagata

SEQ ID NO: 8709 - DNA, 23 bp, Homo sapiens
  source 1..23: mol_type = genomic DNA
atgaatgagtgatgagtagataa

SEQ ID NO: 8710 - DNA, 23 bp, Homo sapiens
  source 1..23: mol_type = genomic DNA
tgaatgagtgatgagtagataaa

SEQ ID NO: 8711 - DNA, 23 bp, Homo sapiens
  source 1..23: mol_type = genomic DNA
gaatgagtgatgagtagataaaa

SEQ ID NO: 8712 - DNA, 23 bp, Homo sapiens
  source 1..23: mol_type = genomic DNA
aatgagtgatgagtagataaaag

SEQ ID NO: 8713 - DNA, 23 bp, Homo sapiens
  source 1..23: mol_type = genomic DNA
atgagtgatgagtagataaaagg

SEQ ID NO: 8714 - DNA, 23 bp, Homo sapiens
  source 1..23: mol_type = genomic DNA
tgagtgatgagtagataaaagga

SEQ ID NO: 8715 - DNA, 23 bp, Homo sapiens
  source 1..23: mol_type = genomic DNA
gagtgatgagtagataaaaggat

SEQ ID NO: 8716 - DNA, 23 bp, Homo sapiens
  source 1..23: mol_type = genomic DNA
agtgatgagtagataaaaggatg

SEQ ID NO: 8717 - DNA, 23 bp, Homo sapiens
  source 1..23: mol_type = genomic DNA
gtgatgagtagataaaaggatgg

SEQ ID NO: 8718 - DNA, 23 bp, Homo sapiens
  source 1..23: mol_type = genomic DNA
tgatgagtagataaaaggatgga

SEQ ID NO: 8719 - DNA, 23 bp, Homo sapiens
  source 1..23: mol_type = genomic DNA
gatgagtagataaaaggatggat

SEQ ID NO: 8720 - DNA, 23 bp, Homo sapiens
  source 1..23: mol_type = genomic DNA
atgagtagataaaaggatggatg

SEQ ID NO: 8721 - DNA, 23 bp, Homo sapiens
  source 1..23: mol_type = genomic DNA
tgagtagataaaaggatggatgg

SEQ ID NO: 8722 - DNA, 23 bp, Homo sapiens
  source 1..23: mol_type = genomic DNA
gagtagataaaaggatggatgga

SEQ ID NO: 8723 - DNA, 23 bp, Homo sapiens
  source 1..23: mol_type = genomic DNA
agtagataaaaggatggatggag

SEQ ID NO: 8724 - DNA, 23 bp, Homo sapiens
  source 1..23: mol_type = genomic DNA
gtagataaaaggatggatggaga

SEQ ID NO: 8725 - DNA, 23 bp, Homo sapiens
  source 1..23: mol_type = genomic DNA
tagataaaaggatggatggagag

SEQ ID NO: 8726 - DNA, 23 bp, Homo sapiens
  source 1..23: mol_type = genomic DNA
agataaaaggatggatggagaga

SEQ ID NO: 8727 - DNA, 23 bp, Homo sapiens
  source 1..23: mol_type = genomic DNA
gataaaaggatggatggagagat

SEQ ID NO: 8728 - DNA, 23 bp, Homo sapiens
  source 1..23: mol_type = genomic DNA
ataaaaggatggatggagagatg

SEQ ID NO: 8729 - DNA, 23 bp, Homo sapiens
  source 1..23: mol_type = genomic DNA
taaaaggatggatggagagatgg

SEQ ID NO: 8730 - DNA, 23 bp, Homo sapiens
  source 1..23: mol_type = genomic DNA
aaaaggatggatggagagatggg

SEQ ID NO: 8731 - DNA, 23 bp, Homo sapiens
  source 1..23: mol_type = genomic DNA
aaaggatggatggagagatgggt

SEQ ID NO: 8732 - DNA, 23 bp, Homo sapiens
  source 1..23: mol_type = genomic DNA
aaggatggatggagagatgggtg

SEQ ID NO: 8733 - DNA, 23 bp, Homo sapiens
  source 1..23: mol_type = genomic DNA
aggatggatggagagatgggtga

SEQ ID NO: 8734 - DNA, 23 bp, Homo sapiens
  source 1..23: mol_type = genomic DNA
ggatggatggagagatgggtgag

SEQ ID NO: 8735 - DNA, 23 bp, Homo sapiens
  source 1..23: mol_type = genomic DNA
gatggatggagagatgggtgagt

SEQ ID NO: 8736 - DNA, 23 bp, Homo sapiens
  source 1..23: mol_type = genomic DNA
atggatggagagatgggtgagta

SEQ ID NO: 8737 - DNA, 23 bp, Homo sapiens
  source 1..23: mol_type = genomic DNA
tggatggagagatgggtgagtac

SEQ ID NO: 8738 - DNA, 23 bp, Homo sapiens
  source 1..23: mol_type = genomic DNA
ggatggagagatgggtgagtaca

SEQ ID NO: 8739 - DNA, 23 bp, Homo sapiens
  source 1..23: mol_type = genomic DNA
gatggagagatgggtgagtacat

SEQ ID NO: 8740 - DNA, 23 bp, Homo sapiens
  source 1..23: mol_type = genomic DNA
atggagagatgggtgagtacatg

SEQ ID NO: 8741 - DNA, 23 bp, Homo sapiens
  source 1..23: mol_type = genomic DNA
tggagagatgggtgagtacatgg

SEQ ID NO: 8742 - DNA, 23 bp, Homo sapiens
  source 1..23: mol_type = genomic DNA
ggagagatgggtgagtacatgga

SEQ ID NO: 8743 - DNA, 23 bp, Homo sapiens
  source 1..23: mol_type = genomic DNA
gagagatgggtgagtacatggat

SEQ ID NO: 8744 - DNA, 23 bp, Homo sapiens
  source 1..23: mol_type = genomic DNA
agagatgggtgagtacatggatg

SEQ ID NO: 8745 - DNA, 23 bp, Homo sapiens
  source 1..23: mol_type = genomic DNA
gagatgggtgagtacatggatgg

SEQ ID NO: 8746 - DNA, 23 bp, Homo sapiens
  source 1..23: mol_type = genomic DNA
agatgggtgagtacatggatgga

SEQ ID NO: 8747 - DNA, 23 bp, Homo sapiens
  source 1..23: mol_type = genomic DNA
gatgggtgagtacatggatggat

SEQ ID NO: 8748 - DNA, 23 bp, Homo sapiens
  source 1..23: mol_type = genomic DNA
atgggtgagtacatggatggata

SEQ ID NO: 8749 - DNA, 23 bp, Homo sapiens
  source 1..23: mol_type = genomic DNA
tgggtgagtacatggatggatag

SEQ ID NO: 8750 - DNA, 23 bp, Homo sapiens
  source 1..23: mol_type = genomic DNA
gggtgagtacatggatggataga

SEQ ID NO: 8751 - DNA, 23 bp, Homo sapiens
  source 1..23: mol_type = genomic DNA
ggtgagtacatggatggatagat

SEQ ID NO: 8752 - DNA, 23 bp, Homo sapiens
  source 1..23: mol_type = genomic DNA
gtgagtacatggatggatagatg

SEQ ID NO: 8753 - DNA, 23 bp, Homo sapiens
  source 1..23: mol_type = genomic DNA
tgagtacatggatggatagatgg

SEQ ID NO: 8754 - DNA, 23 bp, Homo sapiens
  source 1..23: mol_type = genomic DNA
gagtacatggatggatagatgga

SEQ ID NO: 8755 - DNA, 23 bp, Homo sapiens
  source 1..23: mol_type = genomic DNA
agtacatggatggatagatggat

SEQ ID NO: 8756 - DNA, 23 bp, Homo sapiens
  source 1..23: mol_type = genomic DNA
gtacatggatggatagatggatg

SEQ ID NO: 8757 - DNA, 23 bp, Homo sapiens
  source 1..23: mol_type = genomic DNA
tacatggatggatagatggatga

SEQ ID NO: 8758 - DNA, 23 bp, Homo sapiens
  source 1..23: mol_type = genomic DNA
acatggatggatagatggatgag

SEQ ID NO: 8759 - DNA, 23 bp, Homo sapiens
  source 1..23: mol_type = genomic DNA
catggatggatagatggatgagt

SEQ ID NO: 8760 - DNA, 23 bp, Homo sapiens
  source 1..23: mol_type = genomic DNA
atggatggatagatggatgagtt

SEQ ID NO: 8761 - DNA, 23 bp, Homo sapiens
  source 1..23: mol_type = genomic DNA
tggatggatagatggatgagttg

SEQ ID NO: 8762 - DNA, 23 bp, Homo sapiens
  source 1..23: mol_type = genomic DNA
ggatggatagatggatgagttgg

SEQ ID NO: 8763 - DNA, 23 bp, Homo sapiens
  source 1..23: mol_type = genomic DNA
gatggatagatggatgagttggt

SEQ ID NO: 8764 - DNA, 23 bp, Homo sapiens
  source 1..23: mol_type = genomic DNA
atggatagatggatgagttggtg

SEQ ID NO: 8765 - DNA, 23 bp, Homo sapiens
  source 1..23: mol_type = genomic DNA
tggatagatggatgagttggtgg

SEQ ID NO: 8766 - DNA, 23 bp, Homo sapiens
  source 1..23: mol_type = genomic DNA
ggatagatggatgagttggtggg

SEQ ID NO: 8767 - DNA, 23 bp, Homo sapiens
  source 1..23: mol_type = genomic DNA
gatagatggatgagttggtgggt

SEQ ID NO: 8768 - DNA, 23 bp, Homo sapiens
  source 1..23: mol_type = genomic DNA
atagatggatgagttggtgggta

SEQ ID NO: 8769 - DNA, 23 bp, Homo sapiens
  source 1..23: mol_type = genomic DNA
tagatggatgagttggtgggtag

SEQ ID NO: 8770 - DNA, 23 bp, Homo sapiens
  source 1..23: mol_type = genomic DNA
agatggatgagttggtgggtaga

SEQ ID NO: 8771 - DNA, 23 bp, Homo sapiens
  source 1..23: mol_type = genomic DNA
gatggatgagttggtgggtagat

SEQ ID NO: 8772 - DNA, 23 bp, Homo sapiens
  source 1..23: mol_type = genomic DNA
atggatgagttggtgggtagatt

SEQ ID NO: 8773 - DNA, 23 bp, Homo sapiens
  source 1..23: mol_type = genomic DNA
tggatgagttggtgggtagattc

SEQ ID NO: 8774 - DNA, 23 bp, Homo sapiens
  source 1..23: mol_type = genomic DNA
ggatgagttggtgggtagattcg

SEQ ID NO: 8775 - DNA, 23 bp, Homo sapiens
  source 1..23: mol_type = genomic DNA
gatgagttggtgggtagattcgt

SEQ ID NO: 8776 - DNA, 23 bp, Homo sapiens
  source 1..23: mol_type = genomic DNA
atgagttggtgggtagattcgtg

SEQ ID NO: 8777 - DNA, 23 bp, Homo sapiens
  source 1..23: mol_type = genomic DNA
tgagttggtgggtagattcgtgg

SEQ ID NO: 8778 - DNA, 23 bp, Homo sapiens
  source 1..23: mol_type = genomic DNA
gagttggtgggtagattcgtggc

SEQ ID NO: 8779 - DNA, 23 bp, Homo sapiens
  source 1..23: mol_type = genomic DNA
agttggtgggtagattcgtggct

SEQ ID NO: 8780 - DNA, 23 bp, Homo sapiens
  source 1..23: mol_type = genomic DNA
gttggtgggtagattcgtggcta

SEQ ID NO: 8781 - DNA, 23 bp, Homo sapiens
  source 1..23: mol_type = genomic DNA
ttggtgggtagattcgtggctag

SEQ ID NO: 8782 - DNA, 23 bp, Homo sapiens
  source 1..23: mol_type = genomic DNA
tggtgggtagattcgtggctaga

SEQ ID NO: 8783 - DNA, 23 bp, Homo sapiens
  source 1..23: mol_type = genomic DNA
ggtgggtagattcgtggctagat

SEQ ID NO: 8784 - DNA, 23 bp, Homo sapiens
  source 1..23: mol_type = genomic DNA
gtgggtagattcgtggctagatg

SEQ ID NO: 8785 - DNA, 23 bp, Homo sapiens
  source 1..23: mol_type = genomic DNA
tgggtagattcgtggctagatgg

SEQ ID NO: 8786 - DNA, 23 bp, Homo sapiens
  source 1..23: mol_type = genomic DNA
gggtagattcgtggctagatgga

SEQ ID NO: 8787 - DNA, 23 bp, Homo sapiens
  source 1..23: mol_type = genomic DNA
ggtagattcgtggctagatggat

SEQ ID NO: 8788 - DNA, 23 bp, Homo sapiens
  source 1..23: mol_type = genomic DNA
gtagattcgtggctagatggatg

SEQ ID NO: 8789 - DNA, 23 bp, Homo sapiens
  source 1..23: mol_type = genomic DNA
tagattcgtggctagatggatga

SEQ ID NO: 8790 - DNA, 23 bp, Homo sapiens
  source 1..23: mol_type = genomic DNA
agattcgtggctagatggatgat

SEQ ID NO: 8791 - DNA, 23 bp, Homo sapiens
  source 1..23: mol_type = genomic DNA
gattcgtggctagatggatgatg

SEQ ID NO: 8792 - DNA, 23 bp, Homo sapiens
  source 1..23: mol_type = genomic DNA
attcgtggctagatggatgatgg

SEQ ID NO: 8793 - DNA, 23 bp, Homo sapiens
  source 1..23: mol_type = genomic DNA
ttcgtggctagatggatgatgga

SEQ ID NO: 8794 - DNA, 23 bp, Homo sapiens
  source 1..23: mol_type = genomic DNA
tcgtggctagatggatgatggat

SEQ ID NO: 8795 - DNA, 23 bp, Homo sapiens
  source 1..23: mol_type = genomic DNA
cgtggctagatggatgatggatg

SEQ ID NO: 8796 - DNA, 23 bp, Homo sapiens
  source 1..23: mol_type = genomic DNA
gtggctagatggatgatggatgg

SEQ ID NO: 8797 - DNA, 23 bp, Homo sapiens
  source 1..23: mol_type = genomic DNA
tggctagatggatgatggatgga

SEQ ID NO: 8798 - DNA, 23 bp, Homo sapiens
  source 1..23: mol_type = genomic DNA
ggctagatggatgatggatggat

SEQ ID NO: 8799 - DNA, 23 bp, Homo sapiens
  source 1..23: mol_type = genomic DNA
gctagatggatgatggatggatg

SEQ ID NO: 8800 - DNA, 23 bp, Homo sapiens
  source 1..23: mol_type = genomic DNA
ctagatggatgatggatggatgg

SEQ ID NO: 8801 - DNA, 23 bp, Homo sapiens
  source 1..23: mol_type = genomic DNA
tagatggatgatggatggatgga

SEQ ID NO: 8802 - DNA, 23 bp, Homo sapiens
  source 1..23: mol_type = genomic DNA
agatggatgatggatggatggac

SEQ ID NO: 8803 - DNA, 23 bp, Homo sapiens
  source 1..23: mol_type = genomic DNA
gatggatgatggatggatggaca

SEQ ID NO: 8804 - DNA, 23 bp, Homo sapiens
  source 1..23: mol_type = genomic DNA
atggatgatggatggatggacag

SEQ ID NO: 8805 - DNA, 23 bp, Homo sapiens
  source 1..23: mol_type = genomic DNA
tggatgatggatggatggacaga

SEQ ID NO: 8806 - DNA, 23 bp, Homo sapiens
  source 1..23: mol_type = genomic DNA
ggatgatggatggatggacagat

SEQ ID NO: 8807 - DNA, 23 bp, Homo sapiens
  source 1..23: mol_type = genomic DNA
gatgatggatggatggacagatg

SEQ ID NO: 8808 - DNA, 23 bp, Homo sapiens
  source 1..23: mol_type = genomic DNA
atgatggatggatggacagatgg

SEQ ID NO: 8809 - DNA, 23 bp, Homo sapiens
  source 1..23: mol_type = genomic DNA
tgatggatggatggacagatgga

SEQ ID NO: 8810 - DNA, 23 bp, Homo sapiens
  source 1..23: mol_type = genomic DNA
gatggatggatggacagatggat

SEQ ID NO: 8811 - DNA, 23 bp, Homo sapiens
  source 1..23: mol_type = genomic DNA
atggatggatggacagatggatg

SEQ ID NO: 8812 - DNA, 23 bp, Homo sapiens
  source 1..23: mol_type = genomic DNA
tggatggatggacagatggatgg

SEQ ID NO: 8813 - DNA, 23 bp, Homo sapiens
  source 1..23: mol_type = genomic DNA
ggatggatggacagatggatgga

SEQ ID NO: 8814 - DNA, 23 bp, Homo sapiens
  source 1..23: mol_type = genomic DNA
gatggatggacagatggatggat

SEQ ID NO: 8815 - DNA, 23 bp, Homo sapiens
  source 1..23: mol_type = genomic DNA
atggatggacagatggatggata

SEQ ID NO: 8816 - DNA, 23 bp, Homo sapiens
  source 1..23: mol_type = genomic DNA
tggatggacagatggatggatat

SEQ ID NO: 8817 - DNA, 23 bp, Homo sapiens
  source 1..23: mol_type = genomic DNA
ggatggacagatggatggatata

SEQ ID NO: 8818 - DNA, 23 bp, Homo sapiens
  source 1..23: mol_type = genomic DNA
gatggacagatggatggatatat

SEQ ID NO: 8819 - DNA, 23 bp, Homo sapiens
  source 1..23: mol_type = genomic DNA
atggacagatggatggatatatg

SEQ ID NO: 8820 - DNA, 23 bp, Homo sapiens
  source 1..23: mol_type = genomic DNA
tggacagatggatggatatatga

SEQ ID NO: 8821 - DNA, 23 bp, Homo sapiens
  source 1..23: mol_type = genomic DNA
ggacagatggatggatatatgat

SEQ ID NO: 8822 - DNA, 23 bp, Homo sapiens
  source 1..23: mol_type = genomic DNA
gacagatggatggatatatgatt

SEQ ID NO: 8823 - DNA, 23 bp, Homo sapiens
  source 1..23: mol_type = genomic DNA
acagatggatggatatatgattg

SEQ ID NO: 8824 - DNA, 23 bp, Homo sapiens
  source 1..23: mol_type = genomic DNA
cagatggatggatatatgattga

SEQ ID NO: 8825 - DNA, 23 bp, Homo sapiens
  source 1..23: mol_type = genomic DNA
agatggatggatatatgattgaa

SEQ ID NO: 8826 - DNA, 23 bp, Homo sapiens
  source 1..23: mol_type = genomic DNA
gatggatggatatatgattgaac

SEQ ID NO: 8827 - DNA, 23 bp, Homo sapiens
  source 1..23: mol_type = genomic DNA
atggatggatatatgattgaact

SEQ ID NO: 8828 - DNA, 23 bp, Homo sapiens
  source 1..23: mol_type = genomic DNA
tggatggatatatgattgaacta

SEQ ID NO: 8829 - DNA, 23 bp, Homo sapiens
  source 1..23: mol_type = genomic DNA
ggatggatatatgattgaactat

SEQ ID NO: 8830 - DNA, 23 bp, Homo sapiens
  source 1..23: mol_type = genomic DNA
gatggatatatgattgaactatt

SEQ ID NO: 8831 - DNA, 23 bp, Homo sapiens
  source 1..23: mol_type = genomic DNA
atggatatatgattgaactattg

SEQ ID NO: 8832 - DNA, 23 bp, Homo sapiens
  source 1..23: mol_type = genomic DNA
tggatatatgattgaactattga

SEQ ID NO: 8833 - DNA, 23 bp, Homo sapiens
  source 1..23: mol_type = genomic DNA
ggatatatgattgaactattgaa

SEQ ID NO: 8834 - DNA, 23 bp, Homo sapiens
  source 1..23: mol_type = genomic DNA
gatatatgattgaactattgaaa

SEQ ID NO: 8835 - DNA, 23 bp, Homo sapiens
  source 1..23: mol_type = genomic DNA
atatatgattgaactattgaaag

SEQ ID NO: 8836 - DNA, 23 bp, Homo sapiens
  source 1..23: mol_type = genomic DNA
tatatgattgaactattgaaagt

SEQ ID NO: 8837 - DNA, 23 bp, Homo sapiens
  source 1..23: mol_type = genomic DNA
atatgattgaactattgaaagta

SEQ ID NO: 8838 - DNA, 23 bp, Homo sapiens
  source 1..23: mol_type = genomic DNA
tatgattgaactattgaaagtat

SEQ ID NO: 8839 - DNA, 23 bp, Homo sapiens
  source 1..23: mol_type = genomic DNA
atgattgaactattgaaagtata

SEQ ID NO: 8840 - DNA, 23 bp, Homo sapiens
  source 1..23: mol_type = genomic DNA
tgattgaactattgaaagtatag

SEQ ID NO: 8841 - DNA, 23 bp, Homo sapiens
  source 1..23: mol_type = genomic DNA
gattgaactattgaaagtataga

SEQ ID NO: 8842 - DNA, 23 bp, Homo sapiens
  source 1..23: mol_type = genomic DNA
attgaactattgaaagtatagat

SEQ ID NO: 8843 - DNA, 23 bp, Homo sapiens
  source 1..23: mol_type = genomic DNA
ttgaactattgaaagtatagatg

SEQ ID NO: 8844 - DNA, 23 bp, Homo sapiens
  source 1..23: mol_type = genomic DNA
tgaactattgaaagtatagatgt

SEQ ID NO: 8845 - DNA, 23 bp, Homo sapiens
  source 1..23: mol_type = genomic DNA
gaactattgaaagtatagatgta

SEQ ID NO: 8846 - DNA, 23 bp, Homo sapiens
  source 1..23: mol_type = genomic DNA
aactattgaaagtatagatgtat

SEQ ID NO: 8847 - DNA, 23 bp, Homo sapiens
  source 1..23: mol_type = genomic DNA
actattgaaagtatagatgtatg

SEQ ID NO: 8848 - DNA, 23 bp, Homo sapiens
  source 1..23: mol_type = genomic DNA
ctattgaaagtatagatgtatgg

SEQ ID NO: 8849 - DNA, 23 bp, Homo sapiens
  source 1..23: mol_type = genomic DNA
tattgaaagtatagatgtatgga

SEQ ID NO: 8850 - DNA, 23 bp, Homo sapiens
  source 1..23: mol_type = genomic DNA
attgaaagtatagatgtatggat

SEQ ID NO: 8851 - DNA, 23 bp, Homo sapiens
  source 1..23: mol_type = genomic DNA
ttgaaagtatagatgtatggatg

SEQ ID NO: 8852 - DNA, 23 bp, Homo sapiens
  source 1..23: mol_type = genomic DNA
tgaaagtatagatgtatggatgg

SEQ ID NO: 8853 - DNA, 23 bp, Homo sapiens
  source 1..23: mol_type = genomic DNA
gaaagtatagatgtatggatggg

SEQ ID NO: 8854 - DNA, 23 bp, Homo sapiens
  source 1..23: mol_type = genomic DNA
aaagtatagatgtatggatgggt

SEQ ID NO: 8855 - DNA, 23 bp, Homo sapiens
  source 1..23: mol_type = genomic DNA
aagtatagatgtatggatgggtg

SEQ ID NO: 8856 - DNA, 23 bp, Homo sapiens
  source 1..23: mol_type = genomic DNA
agtatagatgtatggatgggtga

SEQ ID NO: 8857 - DNA, 23 bp, Homo sapiens
  source 1..23: mol_type = genomic DNA
gtatagatgtatggatgggtgaa

SEQ ID NO: 8858 - DNA, 23 bp, Homo sapiens
  source 1..23: mol_type = genomic DNA
tatagatgtatggatgggtgaat

SEQ ID NO: 8859 - DNA, 23 bp, Homo sapiens
  source 1..23: mol_type = genomic DNA
atagatgtatggatgggtgaatt

SEQ ID NO: 8860 - DNA, 23 bp, Homo sapiens
  source 1..23: mol_type = genomic DNA
tagatgtatggatgggtgaattt

SEQ ID NO: 8861 - DNA, 23 bp, Homo sapiens
  source 1..23: mol_type = genomic DNA
agatgtatggatgggtgaatttg

SEQ ID NO: 8862 - DNA, 23 bp, Homo sapiens
  source 1..23: mol_type = genomic DNA
gatgtatggatgggtgaatttgg

SEQ ID NO: 8863 - DNA, 23 bp, Homo sapiens
  source 1..23: mol_type = genomic DNA
atgtatggatgggtgaatttggg

SEQ ID NO: 8864 - DNA, 23 bp, Homo sapiens
  source 1..23: mol_type = genomic DNA
tgtatggatgggtgaatttgggg

SEQ ID NO: 8865 - DNA, 23 bp, Homo sapiens
  source 1..23: mol_type = genomic DNA
gtatggatgggtgaatttggggg

SEQ ID NO: 8866 - DNA, 23 bp, Homo sapiens
  source 1..23: mol_type = genomic DNA
tatggatgggtgaatttgggggt

SEQ ID NO: 8867 - DNA, 23 bp, Homo sapiens
  source 1..23: mol_type = genomic DNA
atggatgggtgaatttgggggta

SEQ ID NO: 8868 - DNA, 23 bp, Homo sapiens
  source 1..23: mol_type = genomic DNA
tggatgggtgaatttgggggtaa

SEQ ID NO: 8869 - DNA, 23 bp, Homo sapiens
  source 1..23: mol_type = genomic DNA
ggatgggtgaatttgggggtaat

SEQ ID NO: 8870 - DNA, 23 bp, Homo sapiens
  source 1..23: mol_type = genomic DNA
gatgggtgaatttgggggtaatt

SEQ ID NO: 8871 - DNA, 23 bp, Homo sapiens
  source 1..23: mol_type = genomic DNA
atgggtgaatttgggggtaattg

SEQ ID NO: 8872 - DNA, 23 bp, Homo sapiens
  source 1..23: mol_type = genomic DNA
tgggtgaatttgggggtaattgt

SEQ ID NO: 8873 - DNA, 23 bp, Homo sapiens
  source 1..23: mol_type = genomic DNA
gggtgaatttgggggtaattgtt

SEQ ID NO: 8874 - DNA, 23 bp, Homo sapiens
  source 1..23: mol_type = genomic DNA
ggtgaatttgggggtaattgtta

SEQ ID NO: 8875 - DNA, 23 bp, Homo sapiens
  source 1..23: mol_type = genomic DNA
gtgaatttgggggtaattgttag

SEQ ID NO: 8876 - DNA, 23 bp, Homo sapiens
  source 1..23: mol_type = genomic DNA
tgaatttgggggtaattgttaga

SEQ ID NO: 8877 - DNA, 23 bp, Homo sapiens
  source 1..23: mol_type = genomic DNA
gaatttgggggtaattgttagat

SEQ ID NO: 8878 - DNA, 23 bp, Homo sapiens
  source 1..23: mol_type = genomic DNA
aatttgggggtaattgttagatg

SEQ ID NO: 8879 - DNA, 23 bp, Homo sapiens
  source 1..23: mol_type = genomic DNA
atttgggggtaattgttagatga

SEQ ID NO: 8880 - DNA, 23 bp, Homo sapiens
  source 1..23: mol_type = genomic DNA
tttgggggtaattgttagatgat

SEQ ID NO: 8881 - DNA, 23 bp, Homo sapiens
  source 1..23: mol_type = genomic DNA
ttgggggtaattgttagatgatg

SEQ ID NO: 8882 - DNA, 23 bp, Homo sapiens
  source 1..23: mol_type = genomic DNA
tgggggtaattgttagatgatgg

SEQ ID NO: 8883 - DNA, 23 bp, Homo sapiens
  source 1..23: mol_type = genomic DNA
gggggtaattgttagatgatgga

SEQ ID NO: 8884 - DNA, 23 bp, Homo sapiens
  source 1..23: mol_type = genomic DNA
ggggtaattgttagatgatggat

SEQ ID NO: 8885 - DNA, 23 bp, Homo sapiens
  source 1..23: mol_type = genomic DNA
gggtaattgttagatgatggatg

SEQ ID NO: 8886 - DNA, 23 bp, Homo sapiens
  source 1..23: mol_type = genomic DNA
ggtaattgttagatgatggatga

SEQ ID NO: 8887 - DNA, 23 bp, Homo sapiens
  source 1..23: mol_type = genomic DNA
gtaattgttagatgatggatgag

SEQ ID NO: 8888 - DNA, 23 bp, Homo sapiens
  source 1..23: mol_type = genomic DNA
taattgttagatgatggatgagt

SEQ ID NO: 8889 - DNA, 23 bp, Homo sapiens
  source 1..23: mol_type = genomic DNA
aattgttagatgatggatgagta

SEQ ID NO: 8890 - DNA, 23 bp, Homo sapiens
  source 1..23: mol_type = genomic DNA
attgttagatgatggatgagtat

SEQ ID NO: 8891 - DNA, 23 bp, Homo sapiens
  source 1..23: mol_type = genomic DNA
ttgttagatgatggatgagtata

SEQ ID NO: 8892 - DNA, 23 bp, Homo sapiens
  source 1..23: mol_type = genomic DNA
tgttagatgatggatgagtatag

SEQ ID NO: 8893 - DNA, 23 bp, Homo sapiens
  source 1..23: mol_type = genomic DNA
gttagatgatggatgagtataga

SEQ ID NO: 8894 - DNA, 23 bp, Homo sapiens
  source 1..23: mol_type = genomic DNA
ttagatgatggatgagtatagat

SEQ ID NO: 8895 - DNA, 23 bp, Homo sapiens
  source 1..23: mol_type = genomic DNA
tagatgatggatgagtatagatg

SEQ ID NO: 8896 - DNA, 23 bp, Homo sapiens
  source 1..23: mol_type = genomic DNA
agatgatggatgagtatagatga

SEQ ID NO: 8897 - DNA, 23 bp, Homo sapiens
  source 1..23: mol_type = genomic DNA
gatgatggatgagtatagatgaa

SEQ ID NO: 8898 - DNA, 23 bp, Homo sapiens
  source 1..23: mol_type = genomic DNA
atgatggatgagtatagatgaat

SEQ ID NO: 8899 - DNA, 23 bp, Homo sapiens
  source 1..23: mol_type = genomic DNA
tgatggatgagtatagatgaatg

SEQ ID NO: 8900 - DNA, 23 bp, Homo sapiens
  source 1..23: mol_type = genomic DNA
gatggatgagtatagatgaatga

SEQ ID NO: 8901 - DNA, 23 bp, Homo sapiens
  source 1..23: mol_type = genomic DNA
atggatgagtatagatgaatgat

SEQ ID NO: 8902 - DNA, 23 bp, Homo sapiens
  source 1..23: mol_type = genomic DNA
tggatgagtatagatgaatgatg

SEQ ID NO: 8903 - DNA, 23 bp, Homo sapiens
  source 1..23: mol_type = genomic DNA
ggatgagtatagatgaatgatgg

SEQ ID NO: 8904 - DNA, 23 bp, Homo sapiens
  source 1..23: mol_type = genomic DNA
gatgagtatagatgaatgatgga

SEQ ID NO: 8905 - DNA, 23 bp, Homo sapiens
  source 1..23: mol_type = genomic DNA
atgagtatagatgaatgatggat

SEQ ID NO: 8906 - DNA, 23 bp, Homo sapiens
  source 1..23: mol_type = genomic DNA
tgagtatagatgaatgatggatg

SEQ ID NO: 8907 - DNA, 23 bp, Homo sapiens
  source 1..23: mol_type = genomic DNA
gagtatagatgaatgatggatgg

SEQ ID NO: 8908 - DNA, 23 bp, Homo sapiens
  source 1..23: mol_type = genomic DNA
agtatagatgaatgatggatgga

SEQ ID NO: 8909 - DNA, 23 bp, Homo sapiens
  source 1..23: mol_type = genomic DNA
gtatagatgaatgatggatggat

SEQ ID NO: 8910 - DNA, 23 bp, Homo sapiens
  source 1..23: mol_type = genomic DNA
tatagatgaatgatggatggata

SEQ ID NO: 8911 - DNA, 23 bp, Homo sapiens
  source 1..23: mol_type = genomic DNA
atagatgaatgatggatggataa

SEQ ID NO: 8912 - DNA, 23 bp, Homo sapiens
  source 1..23: mol_type = genomic DNA
tagatgaatgatggatggataac

SEQ ID NO: 8913 - DNA, 23 bp, Homo sapiens
  source 1..23: mol_type = genomic DNA
agatgaatgatggatggataact

SEQ ID NO: 8914 - DNA, 23 bp, Homo sapiens
  source 1..23: mol_type = genomic DNA
gatgaatgatggatggataactt

SEQ ID NO: 8915 - DNA, 23 bp, Homo sapiens
  source 1..23: mol_type = genomic DNA
atgaatgatggatggataacttg

SEQ ID NO: 8916 - DNA, 23 bp, Homo sapiens
  source 1..23: mol_type = genomic DNA
tgaatgatggatggataacttga

SEQ ID NO: 8917 - DNA, 23 bp, Homo sapiens
  source 1..23: mol_type = genomic DNA
gaatgatggatggataacttgat

SEQ ID NO: 8918 - DNA, 23 bp, Homo sapiens
  source 1..23: mol_type = genomic DNA
aatgatggatggataacttgatg

SEQ ID NO: 8919 - DNA, 23 bp, Homo sapiens
  source 1..23: mol_type = genomic DNA
atgatggatggataacttgatga

SEQ ID NO: 8920 - DNA, 23 bp, Homo sapiens
  source 1..23: mol_type = genomic DNA
tgatggatggataacttgatgag

SEQ ID NO: 8921 - DNA, 23 bp, Homo sapiens
  source 1..23: mol_type = genomic DNA
gatggatggataacttgatgagt

SEQ ID NO: 8922 - DNA, 23 bp, Homo sapiens
  source 1..23: mol_type = genomic DNA
atggatggataacttgatgagtg

SEQ ID NO: 8923 - DNA, 23 bp, Homo sapiens
  source 1..23: mol_type = genomic DNA
tggatggataacttgatgagtgg

SEQ ID NO: 8924 - DNA, 23 bp, Homo sapiens
  source 1..23: mol_type = genomic DNA
ggatggataacttgatgagtgga

SEQ ID NO: 8925 - DNA, 23 bp, Homo sapiens
  source 1..23: mol_type = genomic DNA
gatggataacttgatgagtggat

SEQ ID NO: 8926 - DNA, 23 bp, Homo sapiens
  source 1..23: mol_type = genomic DNA
atggataacttgatgagtggata

SEQ ID NO: 8927 - DNA, 23 bp, Homo sapiens
  source 1..23: mol_type = genomic DNA
tggataacttgatgagtggatag

SEQ ID NO: 8928 - DNA, 23 bp, Homo sapiens
  source 1..23: mol_type = genomic DNA
ggataacttgatgagtggataga

SEQ ID NO: 8929 - DNA, 23 bp, Homo sapiens
  source 1..23: mol_type = genomic DNA
gataacttgatgagtggatagat

SEQ ID NO: 8930 - DNA, 23 bp, Homo sapiens
  source 1..23: mol_type = genomic DNA
ataacttgatgagtggatagata

SEQ ID NO: 8931 - DNA, 23 bp, Homo sapiens
  source 1..23: mol_type = genomic DNA
taacttgatgagtggatagatag

SEQ ID NO: 8932 - DNA, 23 bp, Homo sapiens
  source 1..23: mol_type = genomic DNA
aacttgatgagtggatagataga

SEQ ID NO: 8933 - DNA, 23 bp, Homo sapiens
  source 1..23: mol_type = genomic DNA
acttgatgagtggatagatagat

SEQ ID NO: 8934 - DNA, 23 bp, Homo sapiens
  source 1..23: mol_type = genomic DNA
cttgatgagtggatagatagatt

SEQ ID NO: 8935 - DNA, 23 bp, Homo sapiens
  source 1..23: mol_type = genomic DNA
ttgatgagtggatagatagattg

SEQ ID NO: 8936 - DNA, 23 bp, Homo sapiens
  source 1..23: mol_type = genomic DNA
tgatgagtggatagatagattgc

SEQ ID NO: 8937 - DNA, 23 bp, Homo sapiens
  source 1..23: mol_type = genomic DNA
gatgagtggatagatagattgct

SEQ ID NO: 8938 - DNA, 23 bp, Homo sapiens
  source 1..23: mol_type = genomic DNA
atgagtggatagatagattgctg

SEQ ID NO: 8939 - DNA, 23 bp, Homo sapiens
  source 1..23: mol_type = genomic DNA
tgagtggatagatagattgctgg

SEQ ID NO: 8940 - DNA, 23 bp, Homo sapiens
  source 1..23: mol_type = genomic DNA
gagtggatagatagattgctgga

SEQ ID NO: 8941 - DNA, 23 bp, Homo sapiens
  source 1..23: mol_type = genomic DNA
agtggatagatagattgctggat

SEQ ID NO: 8942 - DNA, 23 bp, Homo sapiens
  source 1..23: mol_type = genomic DNA
gtggatagatagattgctggata

SEQ ID NO: 8943 - DNA, 23 bp, Homo sapiens
  source 1..23: mol_type = genomic DNA
tggatagatagattgctggatag

SEQ ID NO: 8944 - DNA, 23 bp, Homo sapiens
  source 1..23: mol_type = genomic DNA
ggatagatagattgctggataga

SEQ ID NO: 8945 - DNA, 23 bp, Homo sapiens
  source 1..23: mol_type = genomic DNA
gatagatagattgctggatagat

SEQ ID NO: 8946 - DNA, 23 bp, Homo sapiens
  source 1..23: mol_type = genomic DNA
atagatagattgctggatagatg

SEQ ID NO: 8947 - DNA, 23 bp, Homo sapiens
  source 1..23: mol_type = genomic DNA
tagatagattgctggatagatga

SEQ ID NO: 8948 - DNA, 23 bp, Homo sapiens
  source 1..23: mol_type = genomic DNA
agatagattgctggatagatgat

SEQ ID NO: 8949 - DNA, 23 bp, Homo sapiens
  source 1..23: mol_type = genomic DNA
gatagattgctggatagatgatt

SEQ ID NO: 8950 - DNA, 23 bp, Homo sapiens
  source 1..23: mol_type = genomic DNA
atagattgctggatagatgattg

SEQ ID NO: 8951 - DNA, 23 bp, Homo sapiens
  source 1..23: mol_type = genomic DNA
tagattgctggatagatgattga

SEQ ID NO: 8952 - DNA, 23 bp, Homo sapiens
  source 1..23: mol_type = genomic DNA
agattgctggatagatgattgac

SEQ ID NO: 8953 - DNA, 23 bp, Homo sapiens
  source 1..23: mol_type = genomic DNA
gattgctggatagatgattgact

SEQ ID NO: 8954 - DNA, 23 bp, Homo sapiens
  source 1..23: mol_type = genomic DNA
attgctggatagatgattgactg

SEQ ID NO: 8955 - DNA, 23 bp, Homo sapiens
  source 1..23: mol_type = genomic DNA
ttgctggatagatgattgactgg

SEQ ID NO: 8956 - DNA, 23 bp, Homo sapiens
  source 1..23: mol_type = genomic DNA
tgctggatagatgattgactggg

SEQ ID NO: 8957 - DNA, 23 bp, Homo sapiens
  source 1..23: mol_type = genomic DNA
gctggatagatgattgactgggt

SEQ ID NO: 8958 - DNA, 23 bp, Homo sapiens
  source 1..23: mol_type = genomic DNA
ctggatagatgattgactgggtg

SEQ ID NO: 8959 - DNA, 23 bp, Homo sapiens
  source 1..23: mol_type = genomic DNA
tggatagatgattgactgggtgg

SEQ ID NO: 8960 - DNA, 23 bp, Homo sapiens
  source 1..23: mol_type = genomic DNA
ggatagatgattgactgggtgga

SEQ ID NO: 8961 - DNA, 23 bp, Homo sapiens
  source 1..23: mol_type = genomic DNA
gatagatgattgactgggtggat

SEQ ID NO: 8962 - DNA, 23 bp, Homo sapiens
  source 1..23: mol_type = genomic DNA
atagatgattgactgggtggata

SEQ ID NO: 8963 - DNA, 23 bp, Homo sapiens
  source 1..23: mol_type = genomic DNA
tagatgattgactgggtggatag

SEQ ID NO: 8964 - DNA, 23 bp, Homo sapiens
  source 1..23: mol_type = genomic DNA
agatgattgactgggtggataga

SEQ ID NO: 8965 - DNA, 23 bp, Homo sapiens
  source 1..23: mol_type = genomic DNA
gatgattgactgggtggatagat

SEQ ID NO: 8966 - DNA, 23 bp, Homo sapiens
  source 1..23: mol_type = genomic DNA
atgattgactgggtggatagatg

SEQ ID NO: 8967 - DNA, 23 bp, Homo sapiens
  source 1..23: mol_type = genomic DNA
tgattgactgggtggatagatga

SEQ ID NO: 8968 - DNA, 23 bp, Homo sapiens
  source 1..23: mol_type = genomic DNA
gattgactgggtggatagatgaa

SEQ ID NO: 8969 - DNA, 23 bp, Homo sapiens
  source 1..23: mol_type = genomic DNA
attgactgggtggatagatgaaa

SEQ ID NO: 8970 - DNA, 23 bp, Homo sapiens
  source 1..23: mol_type = genomic DNA
ttgactgggtggatagatgaaat

SEQ ID NO: 8971 - DNA, 23 bp, Homo sapiens
  source 1..23: mol_type = genomic DNA
tgactgggtggatagatgaaatg

SEQ ID NO: 8972 - DNA, 23 bp, Homo sapiens
  source 1..23: mol_type = genomic DNA
gactgggtggatagatgaaatgt

SEQ ID NO: 8973 - DNA, 23 bp, Homo sapiens
  source 1..23: mol_type = genomic DNA
actgggtggatagatgaaatgtt

SEQ ID NO: 8974 - DNA, 23 bp, Homo sapiens
  source 1..23: mol_type = genomic DNA
ctgggtggatagatgaaatgttg

SEQ ID NO: 8975 - DNA, 23 bp, Homo sapiens
  source 1..23: mol_type = genomic DNA
tgggtggatagatgaaatgttgg

SEQ ID NO: 8976 - DNA, 23 bp, Homo sapiens
  source 1..23: mol_type = genomic DNA
gggtggatagatgaaatgttgga

SEQ ID NO: 8977 - DNA, 23 bp, Homo sapiens
  source 1..23: mol_type = genomic DNA
ggtggatagatgaaatgttggat

SEQ ID NO: 8978 - DNA, 23 bp, Homo sapiens
  source 1..23: mol_type = genomic DNA
gtggatagatgaaatgttggatg

SEQ ID NO: 8979 - DNA, 23 bp, Homo sapiens
  source 1..23: mol_type = genomic DNA
tggatagatgaaatgttggatga

SEQ ID NO: 8980 - DNA, 23 bp, Homo sapiens
  source 1..23: mol_type = genomic DNA
ggatagatgaaatgttggatgag

SEQ ID NO: 8981 - DNA, 23 bp, Homo sapiens
  source 1..23: mol_type = genomic DNA
gatagatgaaatgttggatgagc

SEQ ID NO: 8982 - DNA, 23 bp, Homo sapiens
  source 1..23: mol_type = genomic DNA
atagatgaaatgttggatgagca

SEQ ID NO: 8983 - DNA, 23 bp, Homo sapiens
  source 1..23: mol_type = genomic DNA
tagatgaaatgttggatgagcag

SEQ ID NO: 8984 - DNA, 23 bp, Homo sapiens
  source 1..23: mol_type = genomic DNA
agatgaaatgttggatgagcaga

SEQ ID NO: 8985 - DNA, 23 bp, Homo sapiens
  source 1..23: mol_type = genomic DNA
gatgaaatgttggatgagcagat

SEQ ID NO: 8986 - DNA, 23 bp, Homo sapiens
  source 1..23: mol_type = genomic DNA
atgaaatgttggatgagcagatt

SEQ ID NO: 8987 - DNA, 23 bp, Homo sapiens
  source 1..23: mol_type = genomic DNA
tgaaatgttggatgagcagatta

SEQ ID NO: 8988 - DNA, 23 bp, Homo sapiens
  source 1..23: mol_type = genomic DNA
gaaatgttggatgagcagattaa

SEQ ID NO: 8989 - DNA, 23 bp, Homo sapiens
  source 1..23: mol_type = genomic DNA
aaatgttggatgagcagattaag

SEQ ID NO: 8990 - DNA, 23 bp, Homo sapiens
  source 1..23: mol_type = genomic DNA
aatgttggatgagcagattaagt

SEQ ID NO: 8991 - DNA, 23 bp, Homo sapiens
  source 1..23: mol_type = genomic DNA
atgttggatgagcagattaagtt

SEQ ID NO: 8992 - DNA, 23 bp, Homo sapiens
  source 1..23: mol_type = genomic DNA
tgttggatgagcagattaagttg

SEQ ID NO: 8993 - DNA, 23 bp, Homo sapiens
  source 1..23: mol_type = genomic DNA
gttggatgagcagattaagttgt

SEQ ID NO: 8994 - DNA, 23 bp, Homo sapiens
  source 1..23: mol_type = genomic DNA
ttggatgagcagattaagttgta

SEQ ID NO: 8995 - DNA, 23 bp, Homo sapiens
  source 1..23: mol_type = genomic DNA
tggatgagcagattaagttgtat

SEQ ID NO: 8996 - DNA, 23 bp, Homo sapiens
  source 1..23: mol_type = genomic DNA
ggatgagcagattaagttgtatt

SEQ ID NO: 8997 - DNA, 23 bp, Homo sapiens
  source 1..23: mol_type = genomic DNA
gatgagcagattaagttgtattg

SEQ ID NO: 8998 - DNA, 23 bp, Homo sapiens
  source 1..23: mol_type = genomic DNA
atgagcagattaagttgtattgg

SEQ ID NO: 8999 - DNA, 23 bp, Homo sapiens
  source 1..23: mol_type = genomic DNA
tgagcagattaagttgtattgga

SEQ ID NO: 9000 - DNA, 23 bp, Homo sapiens
  source 1..23: mol_type = genomic DNA
gagcagattaagttgtattggat

SEQ ID NO: 9001 - DNA, 23 bp, Homo sapiens
  source 1..23: mol_type = genomic DNA
agcagattaagttgtattggatg

SEQ ID NO: 9002 - DNA, 23 bp, Homo sapiens
  source 1..23: mol_type = genomic DNA
gcagattaagttgtattggatgg

SEQ ID NO: 9003 - DNA, 23 bp, Homo sapiens
  source 1..23: mol_type = genomic DNA
cagattaagttgtattggatggg

SEQ ID NO: 9004 - DNA, 23 bp, Homo sapiens
  source 1..23: mol_type = genomic DNA
agattaagttgtattggatggga

SEQ ID NO: 9005 - DNA, 23 bp, Homo sapiens
  source 1..23: mol_type = genomic DNA
gattaagttgtattggatgggat

SEQ ID NO: 9006 - DNA, 23 bp, Homo sapiens
  source 1..23: mol_type = genomic DNA
attaagttgtattggatgggatg

SEQ ID NO: 9007 - DNA, 23 bp, Homo sapiens
  source 1..23: mol_type = genomic DNA
ttaagttgtattggatgggatgg

SEQ ID NO: 9008 - DNA, 23 bp, Homo sapiens
  source 1..23: mol_type = genomic DNA
taagttgtattggatgggatgga

SEQ ID NO: 9009 - DNA, 23 bp, Homo sapiens
  source 1..23: mol_type = genomic DNA
aagttgtattggatgggatggat

SEQ ID NO: 9010 - DNA, 23 bp, Homo sapiens
  source 1..23: mol_type = genomic DNA
agttgtattggatgggatggatg

SEQ ID NO: 9011 - DNA, 23 bp, Homo sapiens
  source 1..23: mol_type = genomic DNA
gttgtattggatgggatggatgg

SEQ ID NO: 9012 - DNA, 23 bp, Homo sapiens
  source 1..23: mol_type = genomic DNA
ttgtattggatgggatggatgga

SEQ ID NO: 9013 - DNA, 23 bp, Homo sapiens
  source 1..23: mol_type = genomic DNA
tgtattggatgggatggatggaa

SEQ ID NO: 9014 - DNA, 23 bp, Homo sapiens
  source 1..23: mol_type = genomic DNA
gtattggatgggatggatggaag

SEQ ID NO: 9015 - DNA, 23 bp, Homo sapiens
  source 1..23: mol_type = genomic DNA
tattggatgggatggatggaagt

SEQ ID NO: 9016 - DNA, 23 bp, Homo sapiens
  source 1..23: mol_type = genomic DNA
attggatgggatggatggaagtg

SEQ ID NO: 9017 - DNA, 23 bp, Homo sapiens
  source 1..23: mol_type = genomic DNA
ttggatgggatggatggaagtgt

SEQ ID NO: 9018 - DNA, 23 bp, Homo sapiens
  source 1..23: mol_type = genomic DNA
tggatgggatggatggaagtgtg

SEQ ID NO: 9019 - DNA, 23 bp, Homo sapiens
  source 1..23: mol_type = genomic DNA
ggatgggatggatggaagtgtgg

SEQ ID NO: 9020 - DNA, 23 bp, Homo sapiens
  source 1..23: mol_type = genomic DNA
gatgggatggatggaagtgtggt

SEQ ID NO: 9021 - DNA, 23 bp, Homo sapiens
  source 1..23: mol_type = genomic DNA
atgggatggatggaagtgtggtt

SEQ ID NO: 9022 - DNA, 23 bp, Homo sapiens
  source 1..23: mol_type = genomic DNA
tgggatggatggaagtgtggttg

SEQ ID NO: 9023 - DNA, 23 bp, Homo sapiens
  source 1..23: mol_type = genomic DNA
gggatggatggaagtgtggttga

SEQ ID NO: 9024 - DNA, 23 bp, Homo sapiens
  source 1..23: mol_type = genomic DNA
ggatggatggaagtgtggttgag

SEQ ID NO: 9025 - DNA, 23 bp, Homo sapiens
  source 1..23: mol_type = genomic DNA
gatggatggaagtgtggttgagt

SEQ ID NO: 9026 - DNA, 23 bp, Homo sapiens
  source 1..23: mol_type = genomic DNA
atggatggaagtgtggttgagtt

SEQ ID NO: 9027 - DNA, 23 bp, Homo sapiens
  source 1..23: mol_type = genomic DNA
tggatggaagtgtggttgagtta

SEQ ID NO: 9028 - DNA, 23 bp, Homo sapiens
  source 1..23: mol_type = genomic DNA
ggatggaagtgtggttgagttat

SEQ ID NO: 9029 - DNA, 23 bp, Homo sapiens
  source 1..23: mol_type = genomic DNA
gatggaagtgtggttgagttatt

SEQ ID NO: 9030 - DNA, 23 bp, Homo sapiens
  source 1..23: mol_type = genomic DNA
atggaagtgtggttgagttatta

SEQ ID NO: 9031 - DNA, 23 bp, Homo sapiens
  source 1..23: mol_type = genomic DNA
tggaagtgtggttgagttattag

SEQ ID NO: 9032 - DNA, 23 bp, Homo sapiens
  source 1..23: mol_type = genomic DNA
ggaagtgtggttgagttattaga

SEQ ID NO: 9033 - DNA, 23 bp, Homo sapiens
  source 1..23: mol_type = genomic DNA
gaagtgtggttgagttattagaa

SEQ ID NO: 9034 - DNA, 23 bp, Homo sapiens
  source 1..23: mol_type = genomic DNA
aagtgtggttgagttattagaag

SEQ ID NO: 9035 - DNA, 23 bp, Homo sapiens
  source 1..23: mol_type = genomic DNA
agtgtggttgagttattagaagg

SEQ ID NO: 9036 - DNA, 23 bp, Homo sapiens
  source 1..23: mol_type = genomic DNA
gtgtggttgagttattagaagga

SEQ ID NO: 9037 - DNA, 23 bp, Homo sapiens
  source 1..23: mol_type = genomic DNA
tgtggttgagttattagaaggaa

SEQ ID NO: 9038 - DNA, 23 bp, Homo sapiens
  source 1..23: mol_type = genomic DNA
gtggttgagttattagaaggaag

SEQ ID NO: 9039 - DNA, 23 bp, Homo sapiens
  source 1..23: mol_type = genomic DNA
tggttgagttattagaaggaaga

SEQ ID NO: 9040 - DNA, 23 bp, Homo sapiens
  source 1..23: mol_type = genomic DNA
ggttgagttattagaaggaagat

SEQ ID NO: 9041 - DNA, 23 bp, Homo sapiens
  source 1..23: mol_type = genomic DNA
gttgagttattagaaggaagatt

SEQ ID NO: 9042 - DNA, 23 bp, Homo sapiens
  source 1..23: mol_type = genomic DNA
ttgagttattagaaggaagattg

SEQ ID NO: 9043 - DNA, 23 bp, Homo sapiens
  source 1..23: mol_type = genomic DNA
tgagttattagaaggaagattga

SEQ ID NO: 9044 - DNA, 23 bp, Homo sapiens
  source 1..23: mol_type = genomic DNA
gagttattagaaggaagattgag

SEQ ID NO: 9045 - DNA, 23 bp, Homo sapiens
  source 1..23: mol_type = genomic DNA
agttattagaaggaagattgagt

SEQ ID NO: 9046 - DNA, 23 bp, Homo sapiens
  source 1..23: mol_type = genomic DNA
gttattagaaggaagattgagta

SEQ ID NO: 9047 - DNA, 23 bp, Homo sapiens
  source 1..23: mol_type = genomic DNA
ttattagaaggaagattgagtag

SEQ ID NO: 9048 - DNA, 23 bp, Homo sapiens
  source 1..23: mol_type = genomic DNA
tattagaaggaagattgagtaga

SEQ ID NO: 9049 - DNA, 23 bp, Homo sapiens
  source 1..23: mol_type = genomic DNA
attagaaggaagattgagtagat

SEQ ID NO: 9050 - DNA, 23 bp, Homo sapiens
  source 1..23: mol_type = genomic DNA
ttagaaggaagattgagtagata

SEQ ID NO: 9051 - DNA, 23 bp, Homo sapiens
  source 1..23: mol_type = genomic DNA
tagaaggaagattgagtagatag

SEQ ID NO: 9052 - DNA, 23 bp, Homo sapiens
  source 1..23: mol_type = genomic DNA
agaaggaagattgagtagatagg

SEQ ID NO: 9053 - DNA, 23 bp, Homo sapiens
  source 1..23: mol_type = genomic DNA
gaaggaagattgagtagataggt

SEQ ID NO: 9054 - DNA, 23 bp, Homo sapiens
  source 1..23: mol_type = genomic DNA
aaggaagattgagtagataggtg

SEQ ID NO: 9055 - DNA, 23 bp, Homo sapiens
  source 1..23: mol_type = genomic DNA
aggaagattgagtagataggtga

SEQ ID NO: 9056 - DNA, 23 bp, Homo sapiens
  source 1..23: mol_type = genomic DNA
ggaagattgagtagataggtgaa

SEQ ID NO: 9057 - DNA, 23 bp, Homo sapiens
  source 1..23: mol_type = genomic DNA
gaagattgagtagataggtgaat

SEQ ID NO: 9058 - DNA, 23 bp, Homo sapiens
  source 1..23: mol_type = genomic DNA
aagattgagtagataggtgaatt

SEQ ID NO: 9059 - DNA, 23 bp, Homo sapiens
  source 1..23: mol_type = genomic DNA
agattgagtagataggtgaattt

SEQ ID NO: 9060 - DNA, 23 bp, Homo sapiens
  source 1..23: mol_type = genomic DNA
gattgagtagataggtgaatttg

SEQ ID NO: 9061 - DNA, 23 bp, Homo sapiens
  source 1..23: mol_type = genomic DNA
attgagtagataggtgaatttgt

SEQ ID NO: 9062 - DNA, 23 bp, Homo sapiens
  source 1..23: mol_type = genomic DNA
ttgagtagataggtgaatttgtt

SEQ ID NO: 9063 - DNA, 23 bp, Homo sapiens
  source 1..23: mol_type = genomic DNA
tgagtagataggtgaatttgttg

SEQ ID NO: 9064 - DNA, 23 bp, Homo sapiens
  source 1..23: mol_type = genomic DNA
gagtagataggtgaatttgttga

SEQ ID NO: 9065 - DNA, 23 bp, Homo sapiens
  source 1..23: mol_type = genomic DNA
agtagataggtgaatttgttgat

SEQ ID NO: 9066 - DNA, 23 bp, Homo sapiens
  source 1..23: mol_type = genomic DNA
gtagataggtgaatttgttgata

SEQ ID NO: 9067 - DNA, 23 bp, Homo sapiens
  source 1..23: mol_type = genomic DNA
tagataggtgaatttgttgatag

SEQ ID NO: 9068 - DNA, 23 bp, Homo sapiens
  source 1..23: mol_type = genomic DNA
agataggtgaatttgttgatagt

SEQ ID NO: 9069 - DNA, 23 bp, Homo sapiens
  source 1..23: mol_type = genomic DNA
gataggtgaatttgttgatagtc

SEQ ID NO: 9070 - DNA, 23 bp, Homo sapiens
  source 1..23: mol_type = genomic DNA
ataggtgaatttgttgatagtca

SEQ ID NO: 9071 - DNA, 23 bp, Homo sapiens
  source 1..23: mol_type = genomic DNA
taggtgaatttgttgatagtcag

SEQ ID NO: 9072 - DNA, 23 bp, Homo sapiens
  source 1..23: mol_type = genomic DNA
aggtgaatttgttgatagtcaga

SEQ ID NO: 9073 - DNA, 23 bp, Homo sapiens
  source 1..23: mol_type = genomic DNA
ggtgaatttgttgatagtcagat

SEQ ID NO: 9074 - DNA, 23 bp, Homo sapiens
  source 1..23: mol_type = genomic DNA
gtgaatttgttgatagtcagatg

SEQ ID NO: 9075 - DNA, 23 bp, Homo sapiens
  source 1..23: mol_type = genomic DNA
tgaatttgttgatagtcagatgg

SEQ ID NO: 9076 - DNA, 23 bp, Homo sapiens
  source 1..23: mol_type = genomic DNA
gaatttgttgatagtcagatggg

SEQ ID NO: 9077 - DNA, 23 bp, Homo sapiens
  source 1..23: mol_type = genomic DNA
aatttgttgatagtcagatgggt

SEQ ID NO: 9078 - DNA, 23 bp, Homo sapiens
  source 1..23: mol_type = genomic DNA
atttgttgatagtcagatgggta

SEQ ID NO: 9079 - DNA, 23 bp, Homo sapiens
  source 1..23: mol_type = genomic DNA
tttgttgatagtcagatgggtag

SEQ ID NO: 9080 - DNA, 23 bp, Homo sapiens
  source 1..23: mol_type = genomic DNA
ttgttgatagtcagatgggtaga

SEQ ID NO: 9081 - DNA, 23 bp, Homo sapiens
  source 1..23: mol_type = genomic DNA
tgttgatagtcagatgggtagat

SEQ ID NO: 9082 - DNA, 23 bp, Homo sapiens
  source 1..23: mol_type = genomic DNA
gttgatagtcagatgggtagata

SEQ ID NO: 9083 - DNA, 23 bp, Homo sapiens
  source 1..23: mol_type = genomic DNA
ttgatagtcagatgggtagatag

SEQ ID NO: 9084 - DNA, 23 bp, Homo sapiens
  source 1..23: mol_type = genomic DNA
tgatagtcagatgggtagatagg

SEQ ID NO: 9085 - DNA, 23 bp, Homo sapiens
  source 1..23: mol_type = genomic DNA
gatagtcagatgggtagataggt

SEQ ID NO: 9086 - DNA, 23 bp, Homo sapiens
  source 1..23: mol_type = genomic DNA
atagtcagatgggtagataggta

SEQ ID NO: 9087 - DNA, 23 bp, Homo sapiens
  source 1..23: mol_type = genomic DNA
tagtcagatgggtagataggtag

SEQ ID NO: 9088 - DNA, 23 bp, Homo sapiens
  source 1..23: mol_type = genomic DNA
agtcagatgggtagataggtaga

SEQ ID NO: 9089 - DNA, 23 bp, Homo sapiens
  source 1..23: mol_type = genomic DNA
gtcagatgggtagataggtagat

SEQ ID NO: 9090 - DNA, 23 bp, Homo sapiens
  source 1..23: mol_type = genomic DNA
tcagatgggtagataggtagatg

SEQ ID NO: 9091 - DNA, 23 bp, Homo sapiens
  source 1..23: mol_type = genomic DNA
cagatgggtagataggtagatgg

SEQ ID NO: 9092 - DNA, 23 bp, Homo sapiens
  source 1..23: mol_type = genomic DNA
agatgggtagataggtagatgga

SEQ ID NO: 9093 - DNA, 23 bp, Homo sapiens
  source 1..23: mol_type = genomic DNA
gatgggtagataggtagatggat

SEQ ID NO: 9094 - DNA, 23 bp, Homo sapiens
  source 1..23: mol_type = genomic DNA
atgggtagataggtagatggatg

SEQ ID NO: 9095 - DNA, 23 bp, Homo sapiens
  source 1..23: mol_type = genomic DNA
tgggtagataggtagatggatgg

SEQ ID NO: 9096 - DNA, 23 bp, Homo sapiens
  source 1..23: mol_type = genomic DNA
gggtagataggtagatggatgga

SEQ ID NO: 9097 - DNA, 23 bp, Homo sapiens
  source 1..23: mol_type = genomic DNA
ggtagataggtagatggatggat

SEQ ID NO: 9098 - DNA, 23 bp, Homo sapiens
  source 1..23: mol_type = genomic DNA
gtagataggtagatggatggatg

SEQ ID NO: 9099 - DNA, 23 bp, Homo sapiens
  source 1..23: mol_type = genomic DNA
tagataggtagatggatggatgg

SEQ ID NO: 9100 - DNA, 23 bp, Homo sapiens
  source 1..23: mol_type = genomic DNA
agataggtagatggatggatgga

SEQ ID NO: 9101 - DNA, 23 bp, Homo sapiens
  source 1..23: mol_type = genomic DNA
gataggtagatggatggatggat

SEQ ID NO: 9102 - DNA, 23 bp, Homo sapiens
  source 1..23: mol_type = genomic DNA
ataggtagatggatggatggatg

SEQ ID NO: 9103 - DNA, 23 bp, Homo sapiens
  source 1..23: mol_type = genomic DNA
taggtagatggatggatggatgg

SEQ ID NO: 9104 - DNA, 23 bp, Homo sapiens
  source 1..23: mol_type = genomic DNA
aggtagatggatggatggatgga

SEQ ID NO: 9105 - DNA, 23 bp, Homo sapiens
  source 1..23: mol_type = genomic DNA
ggtagatggatggatggatggat

SEQ ID NO: 9106 - DNA, 23 bp, Homo sapiens
  source 1..23: mol_type = genomic DNA
gtagatggatggatggatggatg

SEQ ID NO: 9107 - DNA, 23 bp, Homo sapiens
  source 1..23: mol_type = genomic DNA
tagatggatggatggatggatgg

SEQ ID NO: 9108 - DNA, 23 bp, Homo sapiens
  source 1..23: mol_type = genomic DNA
agatggatggatggatggatgga

SEQ ID NO: 9109 - DNA, 23 bp, Homo sapiens
  source 1..23: mol_type = genomic DNA
gatggatggatggatggatggat

SEQ ID NO: 9110 - DNA, 23 bp, Homo sapiens
  source 1..23: mol_type = genomic DNA
atggatggatggatggatggatg

SEQ ID NO: 9111 - DNA, 23 bp, Homo sapiens
  source 1..23: mol_type = genomic DNA
tggatggatggatggatggatgt

SEQ ID NO: 9112 - DNA, 23 bp, Homo sapiens
  source 1..23: mol_type = genomic DNA
ggatggatggatggatggatgta

SEQ ID NO: 9113 - DNA, 23 bp, Homo sapiens
  source 1..23: mol_type = genomic DNA
gatggatggatggatggatgtat

SEQ ID NO: 9114 - DNA, 23 bp, Homo sapiens
  source 1..23: mol_type = genomic DNA
atggatggatggatggatgtata

SEQ ID NO: 9115 - DNA, 23 bp, Homo sapiens
  source 1..23: mol_type = genomic DNA
tggatggatggatggatgtatag

SEQ ID NO: 9116 - DNA, 23 bp, Homo sapiens
  source 1..23: mol_type = genomic DNA
ggatggatggatggatgtatagg

SEQ ID NO: 9117 - DNA, 23 bp, Homo sapiens
  source 1..23: mol_type = genomic DNA
gatggatggatggatgtataggc

SEQ ID NO: 9118 - DNA, 23 bp, Homo sapiens
  source 1..23: mol_type = genomic DNA
atggatggatggatgtataggca

SEQ ID NO: 9119 - DNA, 23 bp, Homo sapiens
  source 1..23: mol_type = genomic DNA
tggatggatggatgtataggcag

SEQ ID NO: 9120 - DNA, 23 bp, Homo sapiens
  source 1..23: mol_type = genomic DNA
ggatggatggatgtataggcaga

SEQ ID NO: 9121 - DNA, 23 bp, Homo sapiens
  source 1..23: mol_type = genomic DNA
gatggatggatgtataggcagat

SEQ ID NO: 9122 - DNA, 23 bp, Homo sapiens
  source 1..23: mol_type = genomic DNA
atggatggatgtataggcagatg

SEQ ID NO: 9123 - DNA, 23 bp, Homo sapiens
  source 1..23: mol_type = genomic DNA
tggatggatgtataggcagatgg

SEQ ID NO: 9124 - DNA, 23 bp, Homo sapiens
  source 1..23: mol_type = genomic DNA
ggatggatgtataggcagatgga

SEQ ID NO: 9125 - DNA, 23 bp, Homo sapiens
  source 1..23: mol_type = genomic DNA
gatggatgtataggcagatggac

SEQ ID NO: 9126 - DNA, 23 bp, Homo sapiens
  source 1..23: mol_type = genomic DNA
atggatgtataggcagatggaca

SEQ ID NO: 9127 - DNA, 23 bp, Homo sapiens
  source 1..23: mol_type = genomic DNA
tggatgtataggcagatggacaa

SEQ ID NO: 9128 - DNA, 23 bp, Homo sapiens
  source 1..23: mol_type = genomic DNA
ggatgtataggcagatggacaaa

SEQ ID NO: 9129 - DNA, 23 bp, Homo sapiens
  source 1..23: mol_type = genomic DNA
gatgtataggcagatggacaaat

SEQ ID NO: 9130 - DNA, 23 bp, Homo sapiens
  source 1..23: mol_type = genomic DNA
atgtataggcagatggacaaatg

SEQ ID NO: 9131 - DNA, 23 bp, Homo sapiens
  source 1..23: mol_type = genomic DNA
tgtataggcagatggacaaatgg

SEQ ID NO: 9132 - DNA, 23 bp, Homo sapiens
  source 1..23: mol_type = genomic DNA
gtataggcagatggacaaatgga

SEQ ID NO: 9133 - DNA, 23 bp, Homo sapiens
  source 1..23: mol_type = genomic DNA
tataggcagatggacaaatggat

SEQ ID NO: 9134 - DNA, 23 bp, Homo sapiens
  source 1..23: mol_type = genomic DNA
ataggcagatggacaaatggatg

SEQ ID NO: 9135 - DNA, 23 bp, Homo sapiens
  source 1..23: mol_type = genomic DNA
taggcagatggacaaatggatga

SEQ ID NO: 9136 - DNA, 23 bp, Homo sapiens
  source 1..23: mol_type = genomic DNA
aggcagatggacaaatggatgaa

SEQ ID NO: 9137 - DNA, 23 bp, Homo sapiens
  source 1..23: mol_type = genomic DNA
ggcagatggacaaatggatgaat

SEQ ID NO: 9138 - DNA, 23 bp, Homo sapiens
  source 1..23: mol_type = genomic DNA
gcagatggacaaatggatgaatg

SEQ ID NO: 9139 - DNA, 23 bp, Homo sapiens
  source 1..23: mol_type = genomic DNA
cagatggacaaatggatgaatgg

SEQ ID NO: 9140 - DNA, 23 bp, Homo sapiens
  source 1..23: mol_type = genomic DNA
agatggacaaatggatgaatggg

SEQ ID NO: 9141 - DNA, 23 bp, Homo sapiens
  source 1..23: mol_type = genomic DNA
gatggacaaatggatgaatgggt

SEQ ID NO: 9142 - DNA, 23 bp, Homo sapiens
  source 1..23: mol_type = genomic DNA
atggacaaatggatgaatgggtg

SEQ ID NO: 9143 - DNA, 23 bp, Homo sapiens
  source 1..23: mol_type = genomic DNA
tggacaaatggatgaatgggtgg

SEQ ID NO: 9144 - DNA, 23 bp, Homo sapiens
  source 1..23: mol_type = genomic DNA
ggacaaatggatgaatgggtggg

SEQ ID NO: 9145 - DNA, 23 bp, Homo sapiens
  source 1..23: mol_type = genomic DNA
gacaaatggatgaatgggtgggt

SEQ ID NO: 9146 - DNA, 23 bp, Homo sapiens
  source 1..23: mol_type = genomic DNA
acaaatggatgaatgggtgggtg

SEQ ID NO: 9147 - DNA, 23 bp, Homo sapiens
  source 1..23: mol_type = genomic DNA
caaatggatgaatgggtgggtgg

SEQ ID NO: 9148 - DNA, 23 bp, Homo sapiens
  source 1..23: mol_type = genomic DNA
aaatggatgaatgggtgggtgga

SEQ ID NO: 9149 - DNA, 23 bp, Homo sapiens
  source 1..23: mol_type = genomic DNA
aatggatgaatgggtgggtggat

SEQ ID NO: 9150 - DNA, 23 bp, Homo sapiens
  source 1..23: mol_type = genomic DNA
atggatgaatgggtgggtggatg

SEQ ID NO: 9151 - DNA, 23 bp, Homo sapiens
  source 1..23: mol_type = genomic DNA
tggatgaatgggtgggtggatga

SEQ ID NO: 9152 - DNA, 23 bp, Homo sapiens
  source 1..23: mol_type = genomic DNA
ggatgaatgggtgggtggatgaa

SEQ ID NO: 9153 - DNA, 23 bp, Homo sapiens
  source 1..23: mol_type = genomic DNA
gatgaatgggtgggtggatgaat

SEQ ID NO: 9154 - DNA, 23 bp, Homo sapiens
  source 1..23: mol_type = genomic DNA
atgaatgggtgggtggatgaatg

SEQ ID NO: 9155 - DNA, 23 bp, Homo sapiens
  source 1..23: mol_type = genomic DNA
tgaatgggtgggtggatgaatgg

SEQ ID NO: 9156 - DNA, 23 bp, Homo sapiens
  source 1..23: mol_type = genomic DNA
gaatgggtgggtggatgaatgga

SEQ ID NO: 9157 - DNA, 23 bp, Homo sapiens
  source 1..23: mol_type = genomic DNA
aatgggtgggtggatgaatggaa

SEQ ID NO: 9158 - DNA, 23 bp, Homo sapiens
  source 1..23: mol_type = genomic DNA
atgggtgggtggatgaatggaag

SEQ ID NO: 9159 - DNA, 23 bp, Homo sapiens
  source 1..23: mol_type = genomic DNA
tgggtgggtggatgaatggaagg

SEQ ID NO: 9160 - DNA, 23 bp, Homo sapiens
  source 1..23: mol_type = genomic DNA
gggtgggtggatgaatggaagga

SEQ ID NO: 9161 - DNA, 23 bp, Homo sapiens
  source 1..23: mol_type = genomic DNA
ggtgggtggatgaatggaaggat

SEQ ID NO: 9162 - DNA, 23 bp, Homo sapiens
  source 1..23: mol_type = genomic DNA
gtgggtggatgaatggaaggatg

SEQ ID NO: 9163 - DNA, 23 bp, Homo sapiens
  source 1..23: mol_type = genomic DNA
tgggtggatgaatggaaggatgt

SEQ ID NO: 9164 - DNA, 23 bp, Homo sapiens
  source 1..23: mol_type = genomic DNA
gggtggatgaatggaaggatgtg

SEQ ID NO: 9165 - DNA, 23 bp, Homo sapiens
  source 1..23: mol_type = genomic DNA
ggtggatgaatggaaggatgtgt

SEQ ID NO: 9166 - DNA, 23 bp, Homo sapiens
  source 1..23: mol_type = genomic DNA
gtggatgaatggaaggatgtgtg

SEQ ID NO: 9167 - DNA, 23 bp, Homo sapiens
  source 1..23: mol_type = genomic DNA
tggatgaatggaaggatgtgtgg

SEQ ID NO: 9168 - DNA, 23 bp, Homo sapiens
  source 1..23: mol_type = genomic DNA
ggatgaatggaaggatgtgtggt

SEQ ID NO: 9169 - DNA, 23 bp, Homo sapiens
  source 1..23: mol_type = genomic DNA
gatgaatggaaggatgtgtggtt

SEQ ID NO: 9170 - DNA, 23 bp, Homo sapiens
  source 1..23: mol_type = genomic DNA
atgaatggaaggatgtgtggttg

SEQ ID NO: 9171 - DNA, 23 bp, Homo sapiens
  source 1..23: mol_type = genomic DNA
tgaatggaaggatgtgtggttga

SEQ ID NO: 9172 - DNA, 23 bp, Homo sapiens
  source 1..23: mol_type = genomic DNA
gaatggaaggatgtgtggttgaa

SEQ ID NO: 9173 - DNA, 23 bp, Homo sapiens
  source 1..23: mol_type = genomic DNA
aatggaaggatgtgtggttgaac

SEQ ID NO: 9174 - DNA, 23 bp, Homo sapiens
  source 1..23: mol_type = genomic DNA
atggaaggatgtgtggttgaact

SEQ ID NO: 9175 - DNA, 23 bp, Homo sapiens
  source 1..23: mol_type = genomic DNA
tggaaggatgtgtggttgaacta

SEQ ID NO: 9176 - DNA, 23 bp, Homo sapiens
  source 1..23: mol_type = genomic DNA
ggaaggatgtgtggttgaactat

SEQ ID NO: 9177 - DNA, 23 bp, Homo sapiens
  source 1..23: mol_type = genomic DNA
gaaggatgtgtggttgaactatt

SEQ ID NO: 9178 - DNA, 23 bp, Homo sapiens
  source 1..23: mol_type = genomic DNA
aaggatgtgtggttgaactattg

SEQ ID NO: 9179 - DNA, 23 bp, Homo sapiens
  source 1..23: mol_type = genomic DNA
aggatgtgtggttgaactattgc

SEQ ID NO: 9180 - DNA, 23 bp, Homo sapiens
  source 1..23: mol_type = genomic DNA
ggatgtgtggttgaactattgca

SEQ ID NO: 9181 - DNA, 23 bp, Homo sapiens
  source 1..23: mol_type = genomic DNA
gatgtgtggttgaactattgcaa

SEQ ID NO: 9182 - DNA, 23 bp, Homo sapiens
  source 1..23: mol_type = genomic DNA
atgtgtggttgaactattgcaag

SEQ ID NO: 9183 - DNA, 23 bp, Homo sapiens
  source 1..23: mol_type = genomic DNA
tgtgtggttgaactattgcaagt

SEQ ID NO: 9184 - DNA, 23 bp, Homo sapiens
  source 1..23: mol_type = genomic DNA
gtgtggttgaactattgcaagta

SEQ ID NO: 9185 - DNA, 23 bp, Homo sapiens
  source 1..23: mol_type = genomic DNA
tgtggttgaactattgcaagtat

SEQ ID NO: 9186 - DNA, 23 bp, Homo sapiens
  source 1..23: mol_type = genomic DNA
gtggttgaactattgcaagtatt

SEQ ID NO: 9187 - DNA, 23 bp, Homo sapiens
  source 1..23: mol_type = genomic DNA
tggttgaactattgcaagtattg

SEQ ID NO: 9188 - DNA, 23 bp, Homo sapiens
  source 1..23: mol_type = genomic DNA
ggttgaactattgcaagtattga

SEQ ID NO: 9189 - DNA, 23 bp, Homo sapiens
  source 1..23: mol_type = genomic DNA
gttgaactattgcaagtattgat

SEQ ID NO: 9190 - DNA, 23 bp, Homo sapiens
  source 1..23: mol_type = genomic DNA
ttgaactattgcaagtattgata

SEQ ID NO: 9191 - DNA, 23 bp, Homo sapiens
  source 1..23: mol_type = genomic DNA
tgaactattgcaagtattgataa

SEQ ID NO: 9192 - DNA, 23 bp, Homo sapiens
  source 1..23: mol_type = genomic DNA
gaactattgcaagtattgataat

SEQ ID NO: 9193 - DNA, 23 bp, Homo sapiens
  source 1..23: mol_type = genomic DNA
aactattgcaagtattgataatt

SEQ ID NO: 9194 - DNA, 23 bp, Homo sapiens
  source 1..23: mol_type = genomic DNA
actattgcaagtattgataattg

SEQ ID NO: 9195 - DNA, 23 bp, Homo sapiens
  source 1..23: mol_type = genomic DNA
ctattgcaagtattgataattgg

SEQ ID NO: 9196 - DNA, 23 bp, Homo sapiens
  source 1..23: mol_type = genomic DNA
tattgcaagtattgataattggg

SEQ ID NO: 9197 - DNA, 23 bp, Homo sapiens
  source 1..23: mol_type = genomic DNA
attgcaagtattgataattgggt

SEQ ID NO: 9198 - DNA, 23 bp, Homo sapiens
  source 1..23: mol_type = genomic DNA
ttgcaagtattgataattgggtt

SEQ ID NO: 9199 - DNA, 23 bp, Homo sapiens
  source 1..23: mol_type = genomic DNA
tgcaagtattgataattgggttc

SEQ ID NO: 9200 - DNA, 23 bp, Homo sapiens
  source 1..23: mol_type = genomic DNA
gcaagtattgataattgggttca

SEQ ID NO: 9201 - DNA, 23 bp, Homo sapiens
  source 1..23: mol_type = genomic DNA
caagtattgataattgggttcat

SEQ ID NO: 9202 - DNA, 23 bp, Homo sapiens
  source 1..23: mol_type = genomic DNA
aagtattgataattgggttcata

SEQ ID NO: 9203 - DNA, 23 bp, Homo sapiens
  source 1..23: mol_type = genomic DNA
agtattgataattgggttcataa

SEQ ID NO: 9204 - DNA, 23 bp, Homo sapiens
  source 1..23: mol_type = genomic DNA
gtattgataattgggttcataat

SEQ ID NO: 9205 - DNA, 23 bp, Homo sapiens
  source 1..23: mol_type = genomic DNA
tattgataattgggttcataatt

SEQ ID NO: 9206 - DNA, 23 bp, Homo sapiens
  source 1..23: mol_type = genomic DNA
attgataattgggttcataattt

SEQ ID NO: 9207 - DNA, 23 bp, Homo sapiens
  source 1..23: mol_type = genomic DNA
ttgataattgggttcataatttc

SEQ ID NO: 9208 - DNA, 23 bp, Homo sapiens
  source 1..23: mol_type = genomic DNA
tgataattgggttcataatttct

SEQ ID NO: 9209 - DNA, 23 bp, Homo sapiens
  source 1..23: mol_type = genomic DNA
gataattgggttcataatttctg

SEQ ID NO: 9210 - DNA, 23 bp, Homo sapiens
  source 1..23: mol_type = genomic DNA
ataattgggttcataatttctga

SEQ ID NO: 9211 - DNA, 23 bp, Homo sapiens
  source 1..23: mol_type = genomic DNA
taattgggttcataatttctgaa

SEQ ID NO: 9212 - DNA, 23 bp, Homo sapiens
  source 1..23: mol_type = genomic DNA
aattgggttcataatttctgaat

SEQ ID NO: 9213 - DNA, 23 bp, Homo sapiens
  source 1..23: mol_type = genomic DNA
attgggttcataatttctgaata

SEQ ID NO: 9214 - DNA, 23 bp, Homo sapiens
  source 1..23: mol_type = genomic DNA
ttgggttcataatttctgaatat

SEQ ID NO: 9215 - DNA, 23 bp, Homo sapiens
  source 1..23: mol_type = genomic DNA
tgggttcataatttctgaatatt

SEQ ID NO: 9216 - DNA, 23 bp, Homo sapiens
  source 1..23: mol_type = genomic DNA
gggttcataatttctgaatattt

SEQ ID NO: 9217 - DNA, 23 bp, Homo sapiens
  source 1..23: mol_type = genomic DNA
ggttcataatttctgaatattta

SEQ ID NO: 9218 - DNA, 23 bp, Homo sapiens
  source 1..23: mol_type = genomic DNA
gttcataatttctgaatatttag

SEQ ID NO: 9219 - DNA, 23 bp, Homo sapiens
  source 1..23: mol_type = genomic DNA
ttcataatttctgaatatttaga

SEQ ID NO: 9220 - DNA, 23 bp, Homo sapiens
  source 1..23: mol_type = genomic DNA
tcataatttctgaatatttagat

SEQ ID NO: 9221 - DNA, 23 bp, Homo sapiens
  source 1..23: mol_type = genomic DNA
cataatttctgaatatttagatg

SEQ ID NO: 9222 - DNA, 23 bp, Homo sapiens
  source 1..23: mol_type = genomic DNA
ataatttctgaatatttagatgg

SEQ ID NO: 9223 - DNA, 23 bp, Homo sapiens
  source 1..23: mol_type = genomic DNA
taatttctgaatatttagatgga

SEQ ID NO: 9224 - DNA, 23 bp, Homo sapiens
  source 1..23: mol_type = genomic DNA
aatttctgaatatttagatggat

SEQ ID NO: 9225 - DNA, 23 bp, Homo sapiens
  source 1..23: mol_type = genomic DNA
atttctgaatatttagatggatg

SEQ ID NO: 9226 - DNA, 23 bp, Homo sapiens
  source 1..23: mol_type = genomic DNA
tttctgaatatttagatggatgg

SEQ ID NO: 9227 - DNA, 23 bp, Homo sapiens
  source 1..23: mol_type = genomic DNA
ttctgaatatttagatggatggt

SEQ ID NO: 9228 - DNA, 23 bp, Homo sapiens
  source 1..23: mol_type = genomic DNA
tctgaatatttagatggatggtt

SEQ ID NO: 9229 - DNA, 23 bp, Homo sapiens
  source 1..23: mol_type = genomic DNA
ctgaatatttagatggatggttg

SEQ ID NO: 9230 - DNA, 23 bp, Homo sapiens
  source 1..23: mol_type = genomic DNA
tgaatatttagatggatggttgt

SEQ ID NO: 9231 - DNA, 23 bp, Homo sapiens
  source 1..23: mol_type = genomic DNA
gaatatttagatggatggttgtg

SEQ ID NO: 9232 - DNA, 23 bp, Homo sapiens
  source 1..23: mol_type = genomic DNA
aatatttagatggatggttgtga

SEQ ID NO: 9233 - DNA, 23 bp, Homo sapiens
  source 1..23: mol_type = genomic DNA
atatttagatggatggttgtgag

SEQ ID NO: 9234 - DNA, 23 bp, Homo sapiens
  source 1..23: mol_type = genomic DNA
tatttagatggatggttgtgagt

SEQ ID NO: 9235 - DNA, 23 bp, Homo sapiens
  source 1..23: mol_type = genomic DNA
atttagatggatggttgtgagtg

SEQ ID NO: 9236 - DNA, 23 bp, Homo sapiens
  source 1..23: mol_type = genomic DNA
tttagatggatggttgtgagtgg

SEQ ID NO: 9237 - DNA, 23 bp, Homo sapiens
  source 1..23: mol_type = genomic DNA
ttagatggatggttgtgagtggc

SEQ ID NO: 9238 - DNA, 23 bp, Homo sapiens
  source 1..23: mol_type = genomic DNA
tagatggatggttgtgagtggct

SEQ ID NO: 9239 - DNA, 23 bp, Homo sapiens
  source 1..23: mol_type = genomic DNA
agatggatggttgtgagtggctg

SEQ ID NO: 9240 - DNA, 23 bp, Homo sapiens
  source 1..23: mol_type = genomic DNA
gatggatggttgtgagtggctgg

SEQ ID NO: 9241 - DNA, 23 bp, Homo sapiens
  source 1..23: mol_type = genomic DNA
atggatggttgtgagtggctggt

SEQ ID NO: 9242 - DNA, 23 bp, Homo sapiens
  source 1..23: mol_type = genomic DNA
tggatggttgtgagtggctggtg

SEQ ID NO: 9243 - DNA, 23 bp, Homo sapiens
  source 1..23: mol_type = genomic DNA
ggatggttgtgagtggctggtgg

SEQ ID NO: 9244 - DNA, 23 bp, Homo sapiens
  source 1..23: mol_type = genomic DNA
gatggttgtgagtggctggtgga

SEQ ID NO: 9245 - DNA, 23 bp, Homo sapiens
  source 1..23: mol_type = genomic DNA
atggttgtgagtggctggtggac

SEQ ID NO: 9246 - DNA, 23 bp, Homo sapiens
  source 1..23: mol_type = genomic DNA
tggttgtgagtggctggtggaca

SEQ ID NO: 9247 - DNA, 23 bp, Homo sapiens
  source 1..23: mol_type = genomic DNA
ggttgtgagtggctggtggacag

SEQ ID NO: 9248 - DNA, 23 bp, Homo sapiens
  source 1..23: mol_type = genomic DNA
gttgtgagtggctggtggacaga

SEQ ID NO: 9249 - DNA, 23 bp, Homo sapiens
  source 1..23: mol_type = genomic DNA
ttgtgagtggctggtggacagac

SEQ ID NO: 9250 - DNA, 23 bp, Homo sapiens
  source 1..23: mol_type = genomic DNA
tgtgagtggctggtggacagacg

SEQ ID NO: 9251 - DNA, 23 bp, Homo sapiens
  source 1..23: mol_type = genomic DNA
gtgagtggctggtggacagacga

SEQ ID NO: 9252 - DNA, 23 bp, Homo sapiens
  source 1..23: mol_type = genomic DNA
tgagtggctggtggacagacgaa

SEQ ID NO: 9253 - DNA, 23 bp, Homo sapiens
  source 1..23: mol_type = genomic DNA
gagtggctggtggacagacgaaa

SEQ ID NO: 9254 - DNA, 23 bp, Homo sapiens
  source 1..23: mol_type = genomic DNA
agtggctggtggacagacgaaaa

SEQ ID NO: 9255 - DNA, 23 bp, Homo sapiens
  source 1..23: mol_type = genomic DNA
gtggctggtggacagacgaaaaa

SEQ ID NO: 9256 - DNA, 23 bp, Homo sapiens
  source 1..23: mol_type = genomic DNA
tggctggtggacagacgaaaaat

SEQ ID NO: 9257 - DNA, 23 bp, Homo sapiens
  source 1..23: mol_type = genomic DNA
ggctggtggacagacgaaaaatg

SEQ ID NO: 9258 - DNA, 23 bp, Homo sapiens
  source 1..23: mol_type = genomic DNA
gctggtggacagacgaaaaatgg

SEQ ID NO: 9259 - DNA, 23 bp, Homo sapiens
  source 1..23: mol_type = genomic DNA
ctggtggacagacgaaaaatgga

SEQ ID NO: 9260 - DNA, 23 bp, Homo sapiens
  source 1..23: mol_type = genomic DNA
tggtggacagacgaaaaatggat

SEQ ID NO: 9261 - DNA, 23 bp, Homo sapiens
  source 1..23: mol_type = genomic DNA
ggtggacagacgaaaaatggatg

SEQ ID NO: 9262 - DNA, 23 bp, Homo sapiens
  source 1..23: mol_type = genomic DNA
gtggacagacgaaaaatggatgg

SEQ ID NO: 9263 - DNA, 23 bp, Homo sapiens
  source 1..23: mol_type = genomic DNA
tggacagacgaaaaatggatggt

SEQ ID NO: 9264 - DNA, 23 bp, Homo sapiens
  source 1..23: mol_type = genomic DNA
ggacagacgaaaaatggatggtt

SEQ ID NO: 9265 - DNA, 23 bp, Homo sapiens
  source 1..23: mol_type = genomic DNA
gacagacgaaaaatggatggttg

SEQ ID NO: 9266 - DNA, 23 bp, Homo sapiens
  source 1..23: mol_type = genomic DNA
acagacgaaaaatggatggttgg

SEQ ID NO: 9267 - DNA, 23 bp, Homo sapiens
  source 1..23: mol_type = genomic DNA
cagacgaaaaatggatggttgga

SEQ ID NO: 9268 - DNA, 23 bp, Homo sapiens
  source 1..23: mol_type = genomic DNA
agacgaaaaatggatggttggat

SEQ ID NO: 9269 - DNA, 23 bp, Homo sapiens
  source 1..23: mol_type = genomic DNA
gacgaaaaatggatggttggata

SEQ ID NO: 9270 - DNA, 23 bp, Homo sapiens
  source 1..23: mol_type = genomic DNA
acgaaaaatggatggttggataa

SEQ ID NO: 9271 - DNA, 23 bp, Homo sapiens
  source 1..23: mol_type = genomic DNA
cgaaaaatggatggttggataaa

SEQ ID NO: 9272 - DNA, 23 bp, Homo sapiens
  source 1..23: mol_type = genomic DNA
gaaaaatggatggttggataaat

SEQ ID NO: 9273 - DNA, 23 bp, Homo sapiens
  source 1..23: mol_type = genomic DNA
aaaaatggatggttggataaatt

SEQ ID NO: 9274 - DNA, 23 bp, Homo sapiens
  source 1..23: mol_type = genomic DNA
aaaatggatggttggataaattg

SEQ ID NO: 9275 - DNA, 23 bp, Homo sapiens
  source 1..23: mol_type = genomic DNA
aaatggatggttggataaattga

SEQ ID NO: 9276 - DNA, 23 bp, Homo sapiens
  source 1..23: mol_type = genomic DNA
aatggatggttggataaattgat

SEQ ID NO: 9277 - DNA, 23 bp, Homo sapiens
  source 1..23: mol_type = genomic DNA
atggatggttggataaattgatg

SEQ ID NO: 9278 - DNA, 23 bp, Homo sapiens
  source 1..23: mol_type = genomic DNA
tggatggttggataaattgatgg

SEQ ID NO: 9279 - DNA, 23 bp, Homo sapiens
  source 1..23: mol_type = genomic DNA
ggatggttggataaattgatggg

SEQ ID NO: 9280 - DNA, 23 bp, Homo sapiens
  source 1..23: mol_type = genomic DNA
gatggttggataaattgatgggt

SEQ ID NO: 9281 - DNA, 23 bp, Homo sapiens
  source 1..23: mol_type = genomic DNA
atggttggataaattgatgggtg

SEQ ID NO: 9282 - DNA, 23 bp, Homo sapiens
  source 1..23: mol_type = genomic DNA
tggttggataaattgatgggtgg

SEQ ID NO: 9283 - DNA, 23 bp, Homo sapiens
  source 1..23: mol_type = genomic DNA
ggttggataaattgatgggtgga

SEQ ID NO: 9284 - DNA, 23 bp, Homo sapiens
  source 1..23: mol_type = genomic DNA
gttggataaattgatgggtggat

SEQ ID NO: 9285 - DNA, 23 bp, Homo sapiens
  source 1..23: mol_type = genomic DNA
ttggataaattgatgggtggatg

SEQ ID NO: 9286 - DNA, 23 bp, Homo sapiens
  source 1..23: mol_type = genomic DNA
tggataaattgatgggtggatgg

SEQ ID NO: 9287 - DNA, 23 bp, Homo sapiens
  source 1..23: mol_type = genomic DNA
ggataaattgatgggtggatgga

SEQ ID NO: 9288 - DNA, 23 bp, Homo sapiens
  source 1..23: mol_type = genomic DNA
gataaattgatgggtggatggat

SEQ ID NO: 9289 - DNA, 23 bp, Homo sapiens
  source 1..23: mol_type = genomic DNA
ataaattgatgggtggatggatg

SEQ ID NO: 9290 - DNA, 23 bp, Homo sapiens
  source 1..23: mol_type = genomic DNA
taaattgatgggtggatggatgg

SEQ ID NO: 9291 - DNA, 23 bp, Homo sapiens
  source 1..23: mol_type = genomic DNA
aaattgatgggtggatggatggt

SEQ ID NO: 9292 - DNA, 23 bp, Homo sapiens
  source 1..23: mol_type = genomic DNA
aattgatgggtggatggatggtt

SEQ ID NO: 9293 - DNA, 23 bp, Homo sapiens
  source 1..23: mol_type = genomic DNA
attgatgggtggatggatggttg

SEQ ID NO: 9294 - DNA, 23 bp, Homo sapiens
  source 1..23: mol_type = genomic DNA
ttgatgggtggatggatggttgg

SEQ ID NO: 9295 - DNA, 23 bp, Homo sapiens
  source 1..23: mol_type = genomic DNA
tgatgggtggatggatggttggt

SEQ ID NO: 9296 - DNA, 23 bp, Homo sapiens
  source 1..23: mol_type = genomic DNA
gatgggtggatggatggttggtt

SEQ ID NO: 9297 - DNA, 23 bp, Homo sapiens
  source 1..23: mol_type = genomic DNA
atgggtggatggatggttggttg

SEQ ID NO: 9298 - DNA, 23 bp, Homo sapiens
  source 1..23: mol_type = genomic DNA
tgggtggatggatggttggttgt

SEQ ID NO: 9299 - DNA, 23 bp, Homo sapiens
  source 1..23: mol_type = genomic DNA
gggtggatggatggttggttgta

SEQ ID NO: 9300 - DNA, 23 bp, Homo sapiens
  source 1..23: mol_type = genomic DNA
ggtggatggatggttggttgtat

SEQ ID NO: 9301 - DNA, 23 bp, Homo sapiens
  source 1..23: mol_type = genomic DNA
gtggatggatggttggttgtatg

SEQ ID NO: 9302 - DNA, 23 bp, Homo sapiens
  source 1..23: mol_type = genomic DNA
tggatggatggttggttgtatga

SEQ ID NO: 9303 - DNA, 23 bp, Homo sapiens
  source 1..23: mol_type = genomic DNA
ggatggatggttggttgtatgaa

SEQ ID NO: 9304 - DNA, 23 bp, Homo sapiens
  source 1..23: mol_type = genomic DNA
gatggatggttggttgtatgaaa

SEQ ID NO: 9305 - DNA, 23 bp, Homo sapiens
  source 1..23: mol_type = genomic DNA
atggatggttggttgtatgaaag

SEQ ID NO: 9306 - DNA, 23 bp, Homo sapiens
  source 1..23: mol_type = genomic DNA
tggatggttggttgtatgaaaga

SEQ ID NO: 9307 - DNA, 23 bp, Homo sapiens
  source 1..23: mol_type = genomic DNA
ggatggttggttgtatgaaagaa

SEQ ID NO: 9308 - DNA, 23 bp, Homo sapiens
  source 1..23: mol_type = genomic DNA
gatggttggttgtatgaaagaat

SEQ ID NO: 9309 - DNA, 23 bp, Homo sapiens
  source 1..23: mol_type = genomic DNA
atggttggttgtatgaaagaatg

SEQ ID NO: 9310 - DNA, 23 bp, Homo sapiens
  source 1..23: mol_type = genomic DNA
tggttggttgtatgaaagaatga

SEQ ID NO: 9311 - DNA, 23 bp, Homo sapiens
  source 1..23: mol_type = genomic DNA
ggttggttgtatgaaagaatgaa

SEQ ID NO: 9312 - DNA, 23 bp, Homo sapiens
  source 1..23: mol_type = genomic DNA
gttggttgtatgaaagaatgaat

SEQ ID NO: 9313 - DNA, 23 bp, Homo sapiens
  source 1..23: mol_type = genomic DNA
ttggttgtatgaaagaatgaatg

SEQ ID NO: 9314 - DNA, 23 bp, Homo sapiens
  source 1..23: mol_type = genomic DNA
tggttgtatgaaagaatgaatga

SEQ ID NO: 9315 - DNA, 23 bp, Homo sapiens
  source 1..23: mol_type = genomic DNA
ggttgtatgaaagaatgaatgat

SEQ ID NO: 9316 - DNA, 23 bp, Homo sapiens
  source 1..23: mol_type = genomic DNA
gttgtatgaaagaatgaatgatt

SEQ ID NO: 9317 - DNA, 23 bp, Homo sapiens
  source 1..23: mol_type = genomic DNA
ttgtatgaaagaatgaatgattg

SEQ ID NO: 9318 - DNA, 23 bp, Homo sapiens
  source 1..23: mol_type = genomic DNA
tgtatgaaagaatgaatgattgg

SEQ ID NO: 9319 - DNA, 23 bp, Homo sapiens
  source 1..23: mol_type = genomic DNA
gtatgaaagaatgaatgattggg

SEQ ID NO: 9320 - DNA, 23 bp, Homo sapiens
  source 1..23: mol_type = genomic DNA
tatgaaagaatgaatgattgggt

SEQ ID NO: 9321 - DNA, 23 bp, Homo sapiens
  source 1..23: mol_type = genomic DNA
atgaaagaatgaatgattgggta

SEQ ID NO: 9322 - DNA, 23 bp, Homo sapiens
  source 1..23: mol_type = genomic DNA
tgaaagaatgaatgattgggtag

SEQ ID NO: 9323 - DNA, 23 bp, Homo sapiens
  source 1..23: mol_type = genomic DNA
gaaagaatgaatgattgggtagg

SEQ ID NO: 9324 - DNA, 23 bp, Homo sapiens
  source 1..23: mol_type = genomic DNA
aaagaatgaatgattgggtaggt

SEQ ID NO: 9325 - DNA, 23 bp, Homo sapiens
  source 1..23: mol_type = genomic DNA
aagaatgaatgattgggtaggtg

SEQ ID NO: 9326 - DNA, 23 bp, Homo sapiens
  source 1..23: mol_type = genomic DNA
agaatgaatgattgggtaggtgg

SEQ ID NO: 9327 - DNA, 23 bp, Homo sapiens
  source 1..23: mol_type = genomic DNA
gaatgaatgattgggtaggtgga

SEQ ID NO: 9328 - DNA, 23 bp, Homo sapiens
  source 1..23: mol_type = genomic DNA
aatgaatgattgggtaggtggat

SEQ ID NO: 9329 - DNA, 23 bp, Homo sapiens
  source 1..23: mol_type = genomic DNA
atgaatgattgggtaggtggatt

SEQ ID NO: 9330 - DNA, 23 bp, Homo sapiens
  source 1..23: mol_type = genomic DNA
tgaatgattgggtaggtggatta

SEQ ID NO: 9331 - DNA, 23 bp, Homo sapiens
  source 1..23: mol_type = genomic DNA
gaatgattgggtaggtggattaa

SEQ ID NO: 9332 - DNA, 23 bp, Homo sapiens
  source 1..23: mol_type = genomic DNA
aatgattgggtaggtggattaag

SEQ ID NO: 9333 - DNA, 23 bp, Homo sapiens
  source 1..23: mol_type = genomic DNA
atgattgggtaggtggattaagt

SEQ ID NO: 9334 - DNA, 23 bp, Homo sapiens
  source 1..23: mol_type = genomic DNA
tgattgggtaggtggattaagtt

SEQ ID NO: 9335 - DNA, 23 bp, Homo sapiens
  source 1..23: mol_type = genomic DNA
gattgggtaggtggattaagttg

SEQ ID NO: 9336 - DNA, 23 bp, Homo sapiens
  source 1..23: mol_type = genomic DNA
attgggtaggtggattaagttgc

SEQ ID NO: 9337 - DNA, 23 bp, Homo sapiens
  source 1..23: mol_type = genomic DNA
ttgggtaggtggattaagttgcg

SEQ ID NO: 9338 - DNA, 23 bp, Homo sapiens
  source 1..23: mol_type = genomic DNA
tgggtaggtggattaagttgcgg

SEQ ID NO: 9339 - DNA, 23 bp, Homo sapiens
  source 1..23: mol_type = genomic DNA
gggtaggtggattaagttgcgga

SEQ ID NO: 9340 - DNA, 23 bp, Homo sapiens
  source 1..23: mol_type = genomic DNA
ggtaggtggattaagttgcggat

SEQ ID NO: 9341 - DNA, 23 bp, Homo sapiens
  source 1..23: mol_type = genomic DNA
gtaggtggattaagttgcggatc

SEQ ID NO: 9342 - DNA, 23 bp, Homo sapiens
  source 1..23: mol_type = genomic DNA
taggtggattaagttgcggatca

SEQ ID NO: 9343 - DNA, 23 bp, Homo sapiens
  source 1..23: mol_type = genomic DNA
aggtggattaagttgcggatcaa

SEQ ID NO: 9344 - DNA, 23 bp, Homo sapiens
  source 1..23: mol_type = genomic DNA
ggtggattaagttgcggatcaat

SEQ ID NO: 9345 - DNA, 23 bp, Homo sapiens
  source 1..23: mol_type = genomic DNA
gtggattaagttgcggatcaatg

SEQ ID NO: 9346 - DNA, 23 bp, Homo sapiens
  source 1..23: mol_type = genomic DNA
tggattaagttgcggatcaatgt

SEQ ID NO: 9347 - DNA, 23 bp, Homo sapiens
  source 1..23: mol_type = genomic DNA
ggattaagttgcggatcaatgta

SEQ ID NO: 9348 - DNA, 23 bp, Homo sapiens
  source 1..23: mol_type = genomic DNA
gattaagttgcggatcaatgtat

SEQ ID NO: 9349 - DNA, 23 bp, Homo sapiens
  source 1..23: mol_type = genomic DNA
attaagttgcggatcaatgtatg

SEQ ID NO: 9350 - DNA, 23 bp, Homo sapiens
  source 1..23: mol_type = genomic DNA
ttaagttgcggatcaatgtatgg

SEQ ID NO: 9351 - DNA, 23 bp, Homo sapiens
  source 1..23: mol_type = genomic DNA
taagttgcggatcaatgtatggg

SEQ ID NO: 9352 - DNA, 23 bp, Homo sapiens
  source 1..23: mol_type = genomic DNA
aagttgcggatcaatgtatggga

SEQ ID NO: 9353 - DNA, 23 bp, Homo sapiens
  source 1..23: mol_type = genomic DNA
agttgcggatcaatgtatgggat

SEQ ID NO: 9354 - DNA, 23 bp, Homo sapiens
  source 1..23: mol_type = genomic DNA
gttgcggatcaatgtatgggatg

SEQ ID NO: 9355 - DNA, 23 bp, Homo sapiens
  source 1..23: mol_type = genomic DNA
ttgcggatcaatgtatgggatgg

SEQ ID NO: 9356 - DNA, 23 bp, Homo sapiens
  source 1..23: mol_type = genomic DNA
tgcggatcaatgtatgggatgga

SEQ ID NO: 9357 - DNA, 23 bp, Homo sapiens
  source 1..23: mol_type = genomic DNA
gcggatcaatgtatgggatggat

SEQ ID NO: 9358 - DNA, 23 bp, Homo sapiens
  source 1..23: mol_type = genomic DNA
cggatcaatgtatgggatggatg

SEQ ID NO: 9359 - DNA, 23 bp, Homo sapiens
  source 1..23: mol_type = genomic DNA
ggatcaatgtatgggatggatga

SEQ ID NO: 9360 - DNA, 23 bp, Homo sapiens
  source 1..23: mol_type = genomic DNA
gatcaatgtatgggatggatgaa

SEQ ID NO: 9361 - DNA, 23 bp, Homo sapiens
  source 1..23: mol_type = genomic DNA
atcaatgtatgggatggatgaat

SEQ ID NO: 9362 - DNA, 23 bp, Homo sapiens
  source 1..23: mol_type = genomic DNA
tcaatgtatgggatggatgaatg

SEQ ID NO: 9363 - DNA, 23 bp, Homo sapiens
  source 1..23: mol_type = genomic DNA
caatgtatgggatggatgaatgg

SEQ ID NO: 9364 - DNA, 23 bp, Homo sapiens
  source 1..23: mol_type = genomic DNA
aatgtatgggatggatgaatgga

SEQ ID NO: 9365 - DNA, 23 bp, Homo sapiens
  source 1..23: mol_type = genomic DNA
atgtatgggatggatgaatggat

SEQ ID NO: 9366 - DNA, 23 bp, Homo sapiens
  source 1..23: mol_type = genomic DNA
tgtatgggatggatgaatggatg

SEQ ID NO: 9367 - DNA, 23 bp, Homo sapiens
  source 1..23: mol_type = genomic DNA
gtatgggatggatgaatggatgg

SEQ ID NO: 9368 - DNA, 23 bp, Homo sapiens
  source 1..23: mol_type = genomic DNA
tatgggatggatgaatggatgga

SEQ ID NO: 9369 - DNA, 23 bp, Homo sapiens
  source 1..23: mol_type = genomic DNA
atgggatggatgaatggatggat

SEQ ID NO: 9370 - DNA, 23 bp, Homo sapiens
  source 1..23: mol_type = genomic DNA
tgggatggatgaatggatggatg

SEQ ID NO: 9371 - DNA, 23 bp, Homo sapiens
  source 1..23: mol_type = genomic DNA
gggatggatgaatggatggatgg

SEQ ID NO: 9372 - DNA, 23 bp, Homo sapiens
  source 1..23: mol_type = genomic DNA
ggatggatgaatggatggatgga

SEQ ID NO: 9373 - DNA, 23 bp, Homo sapiens
  source 1..23: mol_type = genomic DNA
gatggatgaatggatggatggat

SEQ ID NO: 9374 - DNA, 23 bp, Homo sapiens
  source 1..23: mol_type = genomic DNA
atggatgaatggatggatggatg

SEQ ID NO: 9375 - DNA, 23 bp, Homo sapiens
  source 1..23: mol_type = genomic DNA
tggatgaatggatggatggatgg

SEQ ID NO: 9376 - DNA, 23 bp, Homo sapiens
  source 1..23: mol_type = genomic DNA
ggatgaatggatggatggatgga

SEQ ID NO: 9377 - DNA, 23 bp, Homo sapiens
  source 1..23: mol_type = genomic DNA
gatgaatggatggatggatggat

SEQ ID NO: 9378 - DNA, 23 bp, Homo sapiens
  source 1..23: mol_type = genomic DNA
atgaatggatggatggatggatg

SEQ ID NO: 9379 - DNA, 23 bp, Homo sapiens
  source 1..23: mol_type = genomic DNA
tgaatggatggatggatggatgt

SEQ ID NO: 9380 - DNA, 23 bp, Homo sapiens
  source 1..23: mol_type = genomic DNA
gaatggatggatggatggatgtg

SEQ ID NO: 9381 - DNA, 23 bp, Homo sapiens
  source 1..23: mol_type = genomic DNA
aatggatggatggatggatgtgt

SEQ ID NO: 9382 - DNA, 23 bp, Homo sapiens
  source 1..23: mol_type = genomic DNA
atggatggatggatggatgtgtg

SEQ ID NO: 9383 - DNA, 23 bp, Homo sapiens
  source 1..23: mol_type = genomic DNA
tggatggatggatggatgtgtgg

SEQ ID NO: 9384 - DNA, 23 bp, Homo sapiens
  source 1..23: mol_type = genomic DNA
ggatggatggatggatgtgtggt

SEQ ID NO: 9385 - DNA, 23 bp, Homo sapiens
  source 1..23: mol_type = genomic DNA
gatggatggatggatgtgtggtt

SEQ ID NO: 9386 - DNA, 23 bp, Homo sapiens
  source 1..23: mol_type = genomic DNA
atggatggatggatgtgtggttg

SEQ ID NO: 9387 - DNA, 23 bp, Homo sapiens
  source 1..23: mol_type = genomic DNA
tggatggatggatgtgtggttga

SEQ ID NO: 9388 - DNA, 23 bp, Homo sapiens
  source 1..23: mol_type = genomic DNA
ggatggatggatgtgtggttgaa

SEQ ID NO: 9389 - DNA, 23 bp, Homo sapiens
  source 1..23: mol_type = genomic DNA
gatggatggatgtgtggttgaat

SEQ ID NO: 9390 - DNA, 23 bp, Homo sapiens
  source 1..23: mol_type = genomic DNA
atggatggatgtgtggttgaatt

SEQ ID NO: 9391 - DNA, 23 bp, Homo sapiens
  source 1..23: mol_type = genomic DNA
tggatggatgtgtggttgaatta

SEQ ID NO: 9392 - DNA, 23 bp, Homo sapiens
  source 1..23: mol_type = genomic DNA
ggatggatgtgtggttgaattac

SEQ ID NO: 9393 - DNA, 23 bp, Homo sapiens
  source 1..23: mol_type = genomic DNA
gatggatgtgtggttgaattact

SEQ ID NO: 9394 - DNA, 23 bp, Homo sapiens
  source 1..23: mol_type = genomic DNA
atggatgtgtggttgaattactg

SEQ ID NO: 9395 - DNA, 23 bp, Homo sapiens
  source 1..23: mol_type = genomic DNA
tggatgtgtggttgaattactga

SEQ ID NO: 9396 - DNA, 23 bp, Homo sapiens
  source 1..23: mol_type = genomic DNA
ggatgtgtggttgaattactgaa

SEQ ID NO: 9397 - DNA, 23 bp, Homo sapiens
  source 1..23: mol_type = genomic DNA
gatgtgtggttgaattactgaaa

SEQ ID NO: 9398 - DNA, 23 bp, Homo sapiens
  source 1..23: mol_type = genomic DNA
atgtgtggttgaattactgaaag

SEQ ID NO: 9399 - DNA, 23 bp, Homo sapiens
  source 1..23: mol_type = genomic DNA
tgtgtggttgaattactgaaagg

SEQ ID NO: 9400 - DNA, 23 bp, Homo sapiens
  source 1..23: mol_type = genomic DNA
gtgtggttgaattactgaaaggt

SEQ ID NO: 9401 - DNA, 23 bp, Homo sapiens
  source 1..23: mol_type = genomic DNA
tgtggttgaattactgaaaggtt

SEQ ID NO: 9402 - DNA, 23 bp, Homo sapiens
  source 1..23: mol_type = genomic DNA
gtggttgaattactgaaaggttg

SEQ ID NO: 9403 - DNA, 23 bp, Homo sapiens
  source 1..23: mol_type = genomic DNA
tggttgaattactgaaaggttgg

SEQ ID NO: 9404 - DNA, 23 bp, Homo sapiens
  source 1..23: mol_type = genomic DNA
ggttgaattactgaaaggttgga

SEQ ID NO: 9405 - DNA, 23 bp, Homo sapiens
  source 1..23: mol_type = genomic DNA
gttgaattactgaaaggttggaa

SEQ ID NO: 9406 - DNA, 23 bp, Homo sapiens
  source 1..23: mol_type = genomic DNA
ttgaattactgaaaggttggaag

SEQ ID NO: 9407 - DNA, 23 bp, Homo sapiens
  source 1..23: mol_type = genomic DNA
tgaattactgaaaggttggaaga

SEQ ID NO: 9408 - DNA, 23 bp, Homo sapiens
  source 1..23: mol_type = genomic DNA
gaattactgaaaggttggaagag

SEQ ID NO: 9409 - DNA, 23 bp, Homo sapiens
  source 1..23: mol_type = genomic DNA
aattactgaaaggttggaagagt

SEQ ID NO: 9410 - DNA, 23 bp, Homo sapiens
  source 1..23: mol_type = genomic DNA
attactgaaaggttggaagagtg

SEQ ID NO: 9411 - DNA, 23 bp, Homo sapiens
  source 1..23: mol_type = genomic DNA
ttactgaaaggttggaagagtgg

SEQ ID NO: 9412 - DNA, 23 bp, Homo sapiens
  source 1..23: mol_type = genomic DNA
tactgaaaggttggaagagtgga

SEQ ID NO: 9413 - DNA, 23 bp, Homo sapiens
  source 1..23: mol_type = genomic DNA
actgaaaggttggaagagtggat

SEQ ID NO: 9414 - DNA, 23 bp, Homo sapiens
  source 1..23: mol_type = genomic DNA
ctgaaaggttggaagagtggatg

SEQ ID NO: 9415 - DNA, 23 bp, Homo sapiens
  source 1..23: mol_type = genomic DNA
tgaaaggttggaagagtggatgg

SEQ ID NO: 9416 - DNA, 23 bp, Homo sapiens
  source 1..23: mol_type = genomic DNA
gaaaggttggaagagtggatggg

SEQ ID NO: 9417 - DNA, 23 bp, Homo sapiens
  source 1..23: mol_type = genomic DNA
aaaggttggaagagtggatgggt

SEQ ID NO: 9418 - DNA, 23 bp, Homo sapiens
  source 1..23: mol_type = genomic DNA
aaggttggaagagtggatgggtg

SEQ ID NO: 9419 - DNA, 23 bp, Homo sapiens
  source 1..23: mol_type = genomic DNA
aggttggaagagtggatgggtga

SEQ ID NO: 9420 - DNA, 23 bp, Homo sapiens
  source 1..23: mol_type = genomic DNA
ggttggaagagtggatgggtgaa

SEQ ID NO: 9421 - DNA, 23 bp, Homo sapiens
  source 1..23: mol_type = genomic DNA
gttggaagagtggatgggtgaaa

SEQ ID NO: 9422 - DNA, 23 bp, Homo sapiens
  source 1..23: mol_type = genomic DNA
ttggaagagtggatgggtgaaat

SEQ ID NO: 9423 - DNA, 23 bp, Homo sapiens
  source 1..23: mol_type = genomic DNA
tggaagagtggatgggtgaaatt

SEQ ID NO: 9424 - DNA, 23 bp, Homo sapiens
  source 1..23: mol_type = genomic DNA
ggaagagtggatgggtgaaattt

SEQ ID NO: 9425 - DNA, 23 bp, Homo sapiens
  source 1..23: mol_type = genomic DNA
gaagagtggatgggtgaaatttg

SEQ ID NO: 9426 - DNA, 23 bp, Homo sapiens
  source 1..23: mol_type = genomic DNA
aagagtggatgggtgaaatttgg

SEQ ID NO: 9427 - DNA, 23 bp, Homo sapiens
  source 1..23: mol_type = genomic DNA
agagtggatgggtgaaatttggg

SEQ ID NO: 9428 - DNA, 23 bp, Homo sapiens
  source 1..23: mol_type = genomic DNA
gagtggatgggtgaaatttgggg

SEQ ID NO: 9429 - DNA, 23 bp, Homo sapiens
  source 1..23: mol_type = genomic DNA
agtggatgggtgaaatttggggt

SEQ ID NO: 9430 - DNA, 23 bp, Homo sapiens
  source 1..23: mol_type = genomic DNA
gtggatgggtgaaatttggggta

SEQ ID NO: 9431 - DNA, 23 bp, Homo sapiens
  source 1..23: mol_type = genomic DNA
tggatgggtgaaatttggggtag

SEQ ID NO: 9432 - DNA, 23 bp, Homo sapiens
  source 1..23: mol_type = genomic DNA
ggatgggtgaaatttggggtagt

SEQ ID NO: 9433 - DNA, 23 bp, Homo sapiens
  source 1..23: mol_type = genomic DNA
gatgggtgaaatttggggtagtt

SEQ ID NO: 9434 - DNA, 23 bp, Homo sapiens
  source 1..23: mol_type = genomic DNA
atgggtgaaatttggggtagtta

SEQ ID NO: 9435 - DNA, 23 bp, Homo sapiens
  source 1..23: mol_type = genomic DNA
tgggtgaaatttggggtagttag

SEQ ID NO: 9436 - DNA, 23 bp, Homo sapiens
  source 1..23: mol_type = genomic DNA
gggtgaaatttggggtagttaga

SEQ ID NO: 9437 - DNA, 23 bp, Homo sapiens
  source 1..23: mol_type = genomic DNA
ggtgaaatttggggtagttagat

SEQ ID NO: 9438 - DNA, 23 bp, Homo sapiens
  source 1..23: mol_type = genomic DNA
gtgaaatttggggtagttagatg

SEQ ID NO: 9439 - DNA, 23 bp, Homo sapiens
  source 1..23: mol_type = genomic DNA
tgaaatttggggtagttagatgg

SEQ ID NO: 9440 - DNA, 23 bp, Homo sapiens
  source 1..23: mol_type = genomic DNA
gaaatttggggtagttagatggg

SEQ ID NO: 9441 - DNA, 23 bp, Homo sapiens
  source 1..23: mol_type = genomic DNA
aaatttggggtagttagatgggt

SEQ ID NO: 9442 - DNA, 23 bp, Homo sapiens
  source 1..23: mol_type = genomic DNA
aatttggggtagttagatgggtg

SEQ ID NO: 9443 - DNA, 23 bp, Homo sapiens
  source 1..23: mol_type = genomic DNA
atttggggtagttagatgggtgg

SEQ ID NO: 9444 - DNA, 23 bp, Homo sapiens
  source 1..23: mol_type = genomic DNA
tttggggtagttagatgggtggg

SEQ ID NO: 9445 - DNA, 23 bp, Homo sapiens
  source 1..23: mol_type = genomic DNA
ttggggtagttagatgggtgggt

SEQ ID NO: 9446 - DNA, 23 bp, Homo sapiens
  source 1..23: mol_type = genomic DNA
tggggtagttagatgggtgggtg

SEQ ID NO: 9447 - DNA, 23 bp, Homo sapiens
  source 1..23: mol_type = genomic DNA
ggggtagttagatgggtgggtgt

SEQ ID NO: 9448 - DNA, 23 bp, Homo sapiens
  source 1..23: mol_type = genomic DNA
gggtagttagatgggtgggtgtg

SEQ ID NO: 9449 - DNA, 23 bp, Homo sapiens
  source 1..23: mol_type = genomic DNA
ggtagttagatgggtgggtgtgt

SEQ ID NO: 9450 - DNA, 23 bp, Homo sapiens
  source 1..23: mol_type = genomic DNA
gtagttagatgggtgggtgtgtg

SEQ ID NO: 9451 - DNA, 23 bp, Homo sapiens
  source 1..23: mol_type = genomic DNA
tagttagatgggtgggtgtgtgg

SEQ ID NO: 9452 - DNA, 23 bp, Homo sapiens
  source 1..23: mol_type = genomic DNA
agttagatgggtgggtgtgtgga

SEQ ID NO: 9453 - DNA, 23 bp, Homo sapiens
  source 1..23: mol_type = genomic DNA
gttagatgggtgggtgtgtggat

SEQ ID NO: 9454 - DNA, 23 bp, Homo sapiens
  source 1..23: mol_type = genomic DNA
ttagatgggtgggtgtgtggatg

SEQ ID NO: 9455 - DNA, 23 bp, Homo sapiens
  source 1..23: mol_type = genomic DNA
tagatgggtgggtgtgtggatgg

SEQ ID NO: 9456 - DNA, 23 bp, Homo sapiens
  source 1..23: mol_type = genomic DNA
agatgggtgggtgtgtggatgga

SEQ ID NO: 9457 - DNA, 23 bp, Homo sapiens
  source 1..23: mol_type = genomic DNA
gatgggtgggtgtgtggatggat

SEQ ID NO: 9458 - DNA, 23 bp, Homo sapiens
  source 1..23: mol_type = genomic DNA
atgggtgggtgtgtggatggata

SEQ ID NO: 9459 - DNA, 23 bp, Homo sapiens
  source 1..23: mol_type = genomic DNA
tgggtgggtgtgtggatggataa

SEQ ID NO: 9460 - DNA, 23 bp, Homo sapiens
  source 1..23: mol_type = genomic DNA
gggtgggtgtgtggatggataaa

SEQ ID NO: 9461 - DNA, 23 bp, Homo sapiens
  source 1..23: mol_type = genomic DNA
ggtgggtgtgtggatggataaaa

SEQ ID NO: 9462 - DNA, 23 bp, Homo sapiens
  source 1..23: mol_type = genomic DNA
gtgggtgtgtggatggataaaag

SEQ ID NO: 9463 - DNA, 23 bp, Homo sapiens
  source 1..23: mol_type = genomic DNA
tgggtgtgtggatggataaaaga

SEQ ID NO: 9464 - DNA, 23 bp, Homo sapiens
  source 1..23: mol_type = genomic DNA
gggtgtgtggatggataaaagag

SEQ ID NO: 9465 - DNA, 23 bp, Homo sapiens
  source 1..23: mol_type = genomic DNA
ggtgtgtggatggataaaagagt

SEQ ID NO: 9466 - DNA, 23 bp, Homo sapiens
  source 1..23: mol_type = genomic DNA
gtgtgtggatggataaaagagta

SEQ ID NO: 9467 - DNA, 23 bp, Homo sapiens
  source 1..23: mol_type = genomic DNA
tgtgtggatggataaaagagtag

SEQ ID NO: 9468 - DNA, 23 bp, Homo sapiens
  source 1..23: mol_type = genomic DNA
gtgtggatggataaaagagtaga

SEQ ID NO: 9469 - DNA, 23 bp, Homo sapiens
  source 1..23: mol_type = genomic DNA
tgtggatggataaaagagtagat

SEQ ID NO: 9470 - DNA, 23 bp, Homo sapiens
  source 1..23: mol_type = genomic DNA
gtggatggataaaagagtagatg

SEQ ID NO: 9471 - DNA, 23 bp, Homo sapiens
  source 1..23: mol_type = genomic DNA
tggatggataaaagagtagatga

SEQ ID NO: 9472 - DNA, 23 bp, Homo sapiens
  source 1..23: mol_type = genomic DNA
ggatggataaaagagtagatgaa

SEQ ID NO: 9473 - DNA, 23 bp, Homo sapiens
  source 1..23: mol_type = genomic DNA
gatggataaaagagtagatgaat

SEQ ID NO: 9474 - DNA, 23 bp, Homo sapiens
  source 1..23: mol_type = genomic DNA
atggataaaagagtagatgaatg

SEQ ID NO: 9475 - DNA, 23 bp, Homo sapiens
  source 1..23: mol_type = genomic DNA
tggataaaagagtagatgaatga

SEQ ID NO: 9476 - DNA, 23 bp, Homo sapiens
  source 1..23: mol_type = genomic DNA
ggataaaagagtagatgaatgaa

SEQ ID NO: 9477 - DNA, 23 bp, Homo sapiens
  source 1..23: mol_type = genomic DNA
gataaaagagtagatgaatgaat

SEQ ID NO: 9478 - DNA, 23 bp, Homo sapiens
  source 1..23: mol_type = genomic DNA
ataaaagagtagatgaatgaatt

SEQ ID NO: 9479 - DNA, 23 bp, Homo sapiens
  source 1..23: mol_type = genomic DNA
taaaagagtagatgaatgaatta

SEQ ID NO: 9480 - DNA, 23 bp, Homo sapiens
  source 1..23: mol_type = genomic DNA
aaaagagtagatgaatgaattaa

SEQ ID NO: 9481 - DNA, 23 bp, Homo sapiens
  source 1..23: mol_type = genomic DNA
aaagagtagatgaatgaattaat

SEQ ID NO: 9482 - DNA, 23 bp, Homo sapiens
  source 1..23: mol_type = genomic DNA
aagagtagatgaatgaattaatg

SEQ ID NO: 9483 - DNA, 23 bp, Homo sapiens
  source 1..23: mol_type = genomic DNA
agagtagatgaatgaattaatga

SEQ ID NO: 9484 - DNA, 23 bp, Homo sapiens
  source 1..23: mol_type = genomic DNA
gagtagatgaatgaattaatgaa

SEQ ID NO: 9485 - DNA, 23 bp, Homo sapiens
  source 1..23: mol_type = genomic DNA
agtagatgaatgaattaatgaat

SEQ ID NO: 9486 - DNA, 23 bp, Homo sapiens
  source 1..23: mol_type = genomic DNA
gtagatgaatgaattaatgaata

SEQ ID NO: 9487 - DNA, 23 bp, Homo sapiens
  source 1..23: mol_type = genomic DNA
tagatgaatgaattaatgaataa

SEQ ID NO: 9488 - DNA, 23 bp, Homo sapiens
  source 1..23: mol_type = genomic DNA
agatgaatgaattaatgaataaa

SEQ ID NO: 9489 - DNA, 23 bp, Homo sapiens
  source 1..23: mol_type = genomic DNA
gatgaatgaattaatgaataaac

SEQ ID NO: 9490 - DNA, 23 bp, Homo sapiens
  source 1..23: mol_type = genomic DNA
atgaatgaattaatgaataaaca

SEQ ID NO: 9491 - DNA, 23 bp, Homo sapiens
  source 1..23: mol_type = genomic DNA
tgaatgaattaatgaataaacag

SEQ ID NO: 9492 - DNA, 23 bp, Homo sapiens
  source 1..23: mol_type = genomic DNA
gaatgaattaatgaataaacagg

SEQ ID NO: 9493 - DNA, 23 bp, Homo sapiens
  source 1..23: mol_type = genomic DNA
aatgaattaatgaataaacaggc

SEQ ID NO: 9494 - DNA, 23 bp, Homo sapiens
  source 1..23: mol_type = genomic DNA
atgaattaatgaataaacaggca

SEQ ID NO: 9495 - DNA, 23 bp, Homo sapiens
  source 1..23: mol_type = genomic DNA
tgaattaatgaataaacaggcag

SEQ ID NO: 9496 - DNA, 23 bp, Homo sapiens
  source 1..23: mol_type = genomic DNA
gaattaatgaataaacaggcaga

SEQ ID NO: 9497 - DNA, 23 bp, Homo sapiens
  source 1..23: mol_type = genomic DNA
aattaatgaataaacaggcagat

SEQ ID NO: 9498 - DNA, 23 bp, Homo sapiens
  source 1..23: mol_type = genomic DNA
attaatgaataaacaggcagatg

SEQ ID NO: 9499 - DNA, 23 bp, Homo sapiens
  source 1..23: mol_type = genomic DNA
ttaatgaataaacaggcagatgg

SEQ ID NO: 9500 - DNA, 23 bp, Homo sapiens
  source 1..23: mol_type = genomic DNA
taatgaataaacaggcagatgga

SEQ ID NO: 9501 - DNA, 23 bp, Homo sapiens
  source 1..23: mol_type = genomic DNA
aatgaataaacaggcagatggat

SEQ ID NO: 9502 - DNA, 23 bp, Homo sapiens
  source 1..23: mol_type = genomic DNA
atgaataaacaggcagatggatg

SEQ ID NO: 9503 - DNA, 23 bp, Homo sapiens
  source 1..23: mol_type = genomic DNA
tgaataaacaggcagatggatga

SEQ ID NO: 9504 - DNA, 23 bp, Homo sapiens
  source 1..23: mol_type = genomic DNA
gaataaacaggcagatggatgat

SEQ ID NO: 9505 - DNA, 23 bp, Homo sapiens
  source 1..23: mol_type = genomic DNA
aataaacaggcagatggatgatg

SEQ ID NO: 9506 - DNA, 23 bp, Homo sapiens
  source 1..23: mol_type = genomic DNA
ataaacaggcagatggatgatgt

SEQ ID NO: 9507 - DNA, 23 bp, Homo sapiens
  source 1..23: mol_type = genomic DNA
taaacaggcagatggatgatgta

SEQ ID NO: 9508 - DNA, 23 bp, Homo sapiens
  source 1..23: mol_type = genomic DNA
aaacaggcagatggatgatgtaa

SEQ ID NO: 9509 - DNA, 23 bp, Homo sapiens
  source 1..23: mol_type = genomic DNA
aacaggcagatggatgatgtaag

SEQ ID NO: 9510 - DNA, 23 bp, Homo sapiens
  source 1..23: mol_type = genomic DNA
acaggcagatggatgatgtaagc

SEQ ID NO: 9511 - DNA, 23 bp, Homo sapiens
  source 1..23: mol_type = genomic DNA
caggcagatggatgatgtaagct

SEQ ID NO: 9512 - DNA, 23 bp, Homo sapiens
  source 1..23: mol_type = genomic DNA
aggcagatggatgatgtaagctg

SEQ ID NO: 9513 - DNA, 23 bp, Homo sapiens
  source 1..23: mol_type = genomic DNA
ggcagatggatgatgtaagctgc

SEQ ID NO: 9514 - DNA, 23 bp, Homo sapiens
  source 1..23: mol_type = genomic DNA
gcagatggatgatgtaagctgcc

SEQ ID NO: 9515 - DNA, 23 bp, Homo sapiens
  source 1..23: mol_type = genomic DNA
cagatggatgatgtaagctgccc

SEQ ID NO: 9516 - DNA, 23 bp, Homo sapiens
  source 1..23: mol_type = genomic DNA
agatggatgatgtaagctgcccc

SEQ ID NO: 9517 - DNA, 23 bp, Homo sapiens
  source 1..23: mol_type = genomic DNA
gatggatgatgtaagctgcccca

SEQ ID NO: 9518 - DNA, 23 bp, Homo sapiens
  source 1..23: mol_type = genomic DNA
atggatgatgtaagctgccccag

SEQ ID NO: 9519 - DNA, 23 bp, Homo sapiens
  source 1..23: mol_type = genomic DNA
tggatgatgtaagctgccccaga

SEQ ID NO: 9520 - DNA, 23 bp, Homo sapiens
  source 1..23: mol_type = genomic DNA
ggatgatgtaagctgccccagac

SEQ ID NO: 9521 - DNA, 23 bp, Homo sapiens
  source 1..23: mol_type = genomic DNA
gatgatgtaagctgccccagacc

SEQ ID NO: 9522 - DNA, 23 bp, Homo sapiens
  source 1..23: mol_type = genomic DNA
atgatgtaagctgccccagaccc

SEQ ID NO: 9523 - DNA, 23 bp, Homo sapiens
  source 1..23: mol_type = genomic DNA
tgatgtaagctgccccagaccct

SEQ ID NO: 9524 - DNA, 23 bp, Homo sapiens
  source 1..23: mol_type = genomic DNA
gatgtaagctgccccagaccctg

SEQ ID NO: 9525 - DNA, 23 bp, Homo sapiens
  source 1..23: mol_type = genomic DNA
atgtaagctgccccagaccctgg

SEQ ID NO: 9526 - DNA, 23 bp, Homo sapiens
  source 1..23: mol_type = genomic DNA
tgtaagctgccccagaccctggg

SEQ ID NO: 9527 - DNA, 23 bp, Homo sapiens
  source 1..23: mol_type = genomic DNA
gtaagctgccccagaccctggga

SEQ ID NO: 9528 - DNA, 23 bp, Homo sapiens
  source 1..23: mol_type = genomic DNA
taagctgccccagaccctgggac

SEQ ID NO: 9529 - DNA, 23 bp, Homo sapiens
  source 1..23: mol_type = genomic DNA
aagctgccccagaccctgggacc

SEQ ID NO: 9530 - DNA, 23 bp, Homo sapiens
  source 1..23: mol_type = genomic DNA
agctgccccagaccctgggacct

SEQ ID NO: 9531 - DNA, 23 bp, Homo sapiens
  source 1..23: mol_type = genomic DNA
gctgccccagaccctgggacctc

SEQ ID NO: 9532 - DNA, 23 bp, Homo sapiens
  source 1..23: mol_type = genomic DNA
ctgccccagaccctgggacctct

SEQ ID NO: 9533 - DNA, 23 bp, Homo sapiens
  source 1..23: mol_type = genomic DNA
tgccccagaccctgggacctctg

SEQ ID NO: 9534 - DNA, 23 bp, Homo sapiens
  source 1..23: mol_type = genomic DNA
gccccagaccctgggacctctga

SEQ ID NO: 9535 - DNA, 23 bp, Homo sapiens
  source 1..23: mol_type = genomic DNA
ccccagaccctgggacctctgac

SEQ ID NO: 9536 - DNA, 23 bp, Homo sapiens
  source 1..23: mol_type = genomic DNA
cccagaccctgggacctctgacc

SEQ ID NO: 9537 - DNA, 23 bp, Homo sapiens
  source 1..23: mol_type = genomic DNA
ccagaccctgggacctctgaccc

SEQ ID NO: 9538 - DNA, 23 bp, Homo sapiens
  source 1..23: mol_type = genomic DNA
cagaccctgggacctctgacccc

SEQ ID NO: 9539 - DNA, 23 bp, Homo sapiens
  source 1..23: mol_type = genomic DNA
agaccctgggacctctgaccccc

SEQ ID NO: 9540 - DNA, 23 bp, Homo sapiens
  source 1..23: mol_type = genomic DNA
gaccctgggacctctgacccccg

SEQ ID NO: 9541 - DNA, 23 bp, Homo sapiens
  source 1..23: mol_type = genomic DNA
accctgggacctctgacccccgg

SEQ ID NO: 9542 - DNA, 23 bp, Homo sapiens
  source 1..23: mol_type = genomic DNA
ccctgggacctctgacccccggc

SEQ ID NO: 9543 - DNA, 23 bp, Homo sapiens
  source 1..23: mol_type = genomic DNA
cctgggacctctgacccccggcg

SEQ ID NO: 9544 - DNA, 23 bp, Homo sapiens
  source 1..23: mol_type = genomic DNA
ctgggacctctgacccccggcga

SEQ ID NO: 9545 - DNA, 23 bp, Homo sapiens
  source 1..23: mol_type = genomic DNA
tgggacctctgacccccggcgac

SEQ ID NO: 9546 - DNA, 23 bp, Homo sapiens
  source 1..23: mol_type = genomic DNA
gggacctctgacccccggcgacc

SEQ ID NO: 9547 - DNA, 23 bp, Homo sapiens
  source 1..23: mol_type = genomic DNA
ggacctctgacccccggcgaccc

SEQ ID NO: 9548 - DNA, 23 bp, Homo sapiens
  source 1..23: mol_type = genomic DNA
gacctctgacccccggcgacccc

SEQ ID NO: 9549 - DNA, 23 bp, Homo sapiens
  source 1..23: mol_type = genomic DNA
acctctgacccccggcgacccct

SEQ ID NO: 9550 - DNA, 23 bp, Homo sapiens
  source 1..23: mol_type = genomic DNA
cctctgacccccggcgacccctt

SEQ ID NO: 9551 - DNA, 23 bp, Homo sapiens
  source 1..23: mol_type = genomic DNA
ctctgacccccggcgaccccttg

SEQ ID NO: 9552 - DNA, 23 bp, Homo sapiens
  source 1..23: mol_type = genomic DNA
tctgacccccggcgaccccttgc

SEQ ID NO: 9553 - DNA, 23 bp, Homo sapiens
  source 1..23: mol_type = genomic DNA
ctgacccccggcgaccccttgca

SEQ ID NO: 9554 - DNA, 23 bp, Homo sapiens
  source 1..23: mol_type = genomic DNA
tgacccccggcgaccccttgcac

SEQ ID NO: 9555 - DNA, 23 bp, Homo sapiens
  source 1..23: mol_type = genomic DNA
gacccccggcgaccccttgcact

SEQ ID NO: 9556 - DNA, 23 bp, Homo sapiens
  source 1..23: mol_type = genomic DNA
acccccggcgaccccttgcactc

SEQ ID NO: 9557 - DNA, 23 bp, Homo sapiens
  source 1..23: mol_type = genomic DNA
cccccggcgaccccttgcactct

SEQ ID NO: 9558 - DNA, 23 bp, Homo sapiens
  source 1..23: mol_type = genomic DNA
ccccggcgaccccttgcactctc

SEQ ID NO: 9559 - DNA, 23 bp, Homo sapiens
  source 1..23: mol_type = genomic DNA
cccggcgaccccttgcactctcc

SEQ ID NO: 9560 - DNA, 23 bp, Homo sapiens
  source 1..23: mol_type = genomic DNA
ccggcgaccccttgcactctcca

SEQ ID NO: 9561 - DNA, 23 bp, Homo sapiens
  source 1..23: mol_type = genomic DNA
cggcgaccccttgcactctccat

SEQ ID NO: 9562 - DNA, 23 bp, Homo sapiens
  source 1..23: mol_type = genomic DNA
ggcgaccccttgcactctccatg

SEQ ID NO: 9563 - DNA, 23 bp, Homo sapiens
  source 1..23: mol_type = genomic DNA
gcgaccccttgcactctccatga

SEQ ID NO: 9564 - DNA, 23 bp, Homo sapiens
  source 1..23: mol_type = genomic DNA
cgaccccttgcactctccatgac

SEQ ID NO: 9565 - DNA, 23 bp, Homo sapiens
  source 1..23: mol_type = genomic DNA
gaccccttgcactctccatgaca

SEQ ID NO: 9566 - DNA, 23 bp, Homo sapiens
  source 1..23: mol_type = genomic DNA
accccttgcactctccatgacac

SEQ ID NO: 9567 - DNA, 23 bp, Homo sapiens
  source 1..23: mol_type = genomic DNA
ccccttgcactctccatgacact

SEQ ID NO: 9568 - DNA, 23 bp, Homo sapiens
  source 1..23: mol_type = genomic DNA
cccttgcactctccatgacactt

SEQ ID NO: 9569 - DNA, 23 bp, Homo sapiens
  source 1..23: mol_type = genomic DNA
ccttgcactctccatgacacttt

SEQ ID NO: 9570 - DNA, 23 bp, Homo sapiens
  source 1..23: mol_type = genomic DNA
cttgcactctccatgacactttc

SEQ ID NO: 9571 - DNA, 23 bp, Homo sapiens
  source 1..23: mol_type = genomic DNA
ttgcactctccatgacactttct

SEQ ID NO: 9572 - DNA, 23 bp, Homo sapiens
  source 1..23: mol_type = genomic DNA
tgcactctccatgacactttctc

SEQ ID NO: 9573 - DNA, 23 bp, Homo sapiens
  source 1..23: mol_type = genomic DNA
gcactctccatgacactttctct

SEQ ID NO: 9574 - DNA, 23 bp, Homo sapiens
  source 1..23: mol_type = genomic DNA
cactctccatgacactttctctc

SEQ ID NO: 9575 - DNA, 23 bp, Homo sapiens
  source 1..23: mol_type = genomic DNA
actctccatgacactttctctcc

SEQ ID NO: 9576 - DNA, 23 bp, Homo sapiens
  source 1..23: mol_type = genomic DNA
ctctccatgacactttctctccc

SEQ ID NO: 9577 - DNA, 23 bp, Homo sapiens
  source 1..23: mol_type = genomic DNA
tctccatgacactttctctccca

SEQ ID NO: 9578 - DNA, 23 bp, Homo sapiens
  source 1..23: mol_type = genomic DNA
ctccatgacactttctctcccat

SEQ ID NO: 9579 - DNA, 23 bp, Homo sapiens
  source 1..23: mol_type = genomic DNA
tccatgacactttctctcccatg

SEQ ID NO: 9580 - DNA, 23 bp, Homo sapiens
  source 1..23: mol_type = genomic DNA
ccatgacactttctctcccatgg

SEQ ID NO: 9581 - DNA, 23 bp, Homo sapiens
  source 1..23: mol_type = genomic DNA
catgacactttctctcccatggt

SEQ ID NO: 9582 - DNA, 23 bp, Homo sapiens
  source 1..23: mol_type = genomic DNA
atgacactttctctcccatggtg

SEQ ID NO: 9583 - DNA, 23 bp, Homo sapiens
  source 1..23: mol_type = genomic DNA
tgacactttctctcccatggtgg

SEQ ID NO: 9584 - DNA, 23 bp, Homo sapiens
  source 1..23: mol_type = genomic DNA
gacactttctctcccatggtggc

SEQ ID NO: 9585 - DNA, 23 bp, Homo sapiens
  source 1..23: mol_type = genomic DNA
acactttctctcccatggtggca

SEQ ID NO: 9586 - DNA, 23 bp, Homo sapiens
  source 1..23: mol_type = genomic DNA
cactttctctcccatggtggcag

SEQ ID NO: 9587 - RNA, 9985 nt, Homo sapiens
  source 1..9985: mol_type = mRNA
gcccccggtgctgaaccaagatggccggtggcggccgggccccggcgtgagccaagcgcgggctgcagccgggagatgccccagcccagcggccgctgagcccgacccgacagagccggcccggccgcctccggcccacctgcgagctcggagacatgtctctgctttgcgttggagtcaaaaaagccaagtttgatggtgcccaagagaaattcaacacgtacgtgaccctgaaagtgcagaatgtcaagagcacgaccatcgcggtgcggggcagccagcccagctgggagcaggatttcatgttcgagattaaccgtctggatttgggactgacggtggaggtgtggaataagggtctcatctgggacacaatggtgggcactgtgtggatcccactgaggaccatccgccagtccaatgaggagggccctggagagtggctgacgctggactcccaggtcatcatggcagacagtgagatctgtggcaccaaggaccccaccttccaccgcatcctcctggacacgcgctttgagctacccttagacattcctgaagaggaggctcgctactgggccaagaagctggagcagctcaatgctatgcgggaccaggatgaatattcgttccaagatgagcaagacaagcctctgcctgtccccagcaaccagtgctgcaactggaattattttggctggggtgagcagcacaacgatgaccccgacagtgcagtggatgatcgtgacagtgactaccgcagtgaaacgagcaacagcatcccgccgccctattatactacgtcacaacccaacgcctcagtccaccaatattctgttcgcccaccacccctgggctcccgggagtcctacagtgactccatgcacagttacgaggagttctctgagccacaagccctcagccccacgggtagcagccgctatgcctcttccggggagctgagccagggaagctctcagctgagcgaggacttcgaccctgacgagcacagcctgcagggctccgacatggaggatgagcgggaccgggactcctaccactcctgccacagctcggtcagctaccacaaagactcgcctcgctgggaccaggatgaggaagagctggaggaggacctggaggacttcctggaggaggaggagctgcctgaagatgaggaggagctggaggaggaggaggaggaggtgcctgacgatttgggcagctatgcccagcgtgaagacgtagctgtggctgagcccaaagacttcaaacgcatcagcctcccgccagctgccccagggaaggaggacaaggccccagtggcacccaccgaggcccccgacatggccaaggtggcccccaagccagccacgcccgacaaggtgcctgcagctgagcagatccctgaggctgagccacccaaggacgaggagagtttcaggccgagagaggatgaggaaggccaggaggggcaggactccatgtccagggccaaggccaactggctgcgtgccttcaacaaggtgcggatgcagctgcaggaggcccggggagaaggagagatgtctaaatccctatggttcaaaggcggcccagggggcggtctcatcatcatcgacagcatgccagacatccgcaagaggaaacctatcccactcgtgagcgacttggccatgtccctggtccagtccaggaaagcgggcatcacctcggccttggcctccagcacgttgaacaacgaggagctgaaaaaccacgtttacaagaagaccctgcaagccttaatctaccccatctcgtgcacgacgccacacaacttcgaagtgtggacggccaccacgcccacctactgctacgagtgcgaggggctgctgtggggcatcgcgaggcagggcatgcgctgcaccgagtgcggtgtcaagtgccacgagaagtgccaggacctgctcaacgccgactgcctgcagcgggctgcggagaagagctccaagcacggggcggaggaccggacacagaacatcatcatggtgctcaaggaccgcatgaagatccgggagcgcaacaagcccgagatcttcgagctcatccaggagatcttcgcggtgaccaagacggcgcacacgcagcagatgaaggcggtcaagcagagcgtgctggacggcacgtccaagtggtccgccaagatcagcatcaccgtggtctgcgcccagggcttgcaggcaaaggacaagacaggatccagtgacccctatgtcaccgtccaggtcgggaagaccaagaaacggacaaaaaccatctatgggaacctcaacccggtgtgggaggagaatttccactttgaatgtcacaattcctccgaccgcatcaaggtgcgcgtctgggacgaggatgacgacatcaaatcccgcgtgaaacagaggttcaagagggaatctgacgatttcctggggcagacgatcattgaggtgcggacgctcagcggcgagatggacgtgtggtacaacctggacaagcgaactgacaaatctgccgtgtcgggtgccatccggctccacatcagtgtggagatcaaaggcgaggagaaggtggccccgtaccatgtccagtacacctgtctgcatgagaacctgttccacttcgtgaccgacgtgcagaacaatggggtcgtgaagatcccagatgccaagggtgacgatgcctggaaggtttactacgatgagacagcccaggagattgtggacgagtttgccatgcgctacggcgtcgagtccatctaccaagccatgacccactttgcctgcctctcctccaagtatatgtgcccaggggtgcctgccgtcatgagcaccctgctcgccaacatcaatgcctactacgcacacaccaccgcctccaccaacgtgtctgcctccgaccgcttcgccgcctccaactttgggaaagagcgcttcgtgaaactcctggaccagctgcataactccctgcggattgacctctccatgtaccggaataacttcccagccagcagcccggagagactccaggacctcaaatccactgtggaccttctcaccagcatcaccttctttcggatgaaggtacaagaactccagagcccgccccgagccagccaggtggtaaaggactgtgtgaaagcctgccttaattctacctacgagtacatcttcaataactgccatgaactgtacagccgggagtaccagacagacccggccaagaagggggaagttctcccagaggaacaggggcccagcatcaagaacctcgacttctggtccaagctgattaccctcatagtgtccatcattgaggaagacaagaattcctacactccctgcctcaaccagtttccccaggagctgaatgtgggtaaaatcagcgctgaagtgatgtggaatctgtttgcccaagacatgaagtacgccatggaggagcacgacaagcatcgtctatgcaagagtgccgactacatgaacctccacttcaaggtgaaatggctctacaatgagtatgtgacggaacttcccgccttcaaggaccgcgtgcctgagtaccctgcatggtttgaacccttcgtcatccagtggctggatgagaatgaggaggtgtcccgggatttcctgcacggtgccctggagcgagacaagaaggatgggttccagcagacctcagagcatgccctattctcctgctccgtggtggatgttttctcccaactcaaccagagctttgaaatcatcaagaaactcgagtgtcccgaccctcagatcgtggggcactacatgaggcgctttgccaagaccatcagtaatgtgctcctccagtatgcagacatcatctccaaggactttgcctcctactgctccaaggagaaggagaaagtgccctgcattctcatgaataacactcaacagctacgagttcagctggagaagatgttcgaagccatgggaggaaaggagctggatgctgaagccagtgacatcctgaaggagcttcaggtgaaactcaataacgtcttggatgagctcagccgggtgtttgctaccagcttccagccgcacattgaagagtgtgtcaaacagatgggtgacatccttagccaggttaagggcacaggcaatgtgccagccagtgcctgcagcagcgtggcccaggacgcggacaatgtgttgcagcccatcatggacctgctggacagcaacctgaccctctttgccaaaatctgtgagaagactgtgctgaagcgagtgctgaaggagctgtggaagctggttatgaacaccatggagaaaaccatcgtcctgccgcccctcactgaccagacgatgatcgggaacctcttgagaaaacatggcaagggattagaaaagggcagggtgaaattgccaagccactcagacggaacccagatgatcttcaatgcagccaaggagctgggtcagctgtccaaactcaaggatcacatggtacgagaagaagccaagagcttgaccccaaagcagtgcgcggttgttgagttggccctggacaccatcaagcaatatttccacgcgggtggcgtgggcctcaagaagaccttcctggagaagagcccggacctgcaatccttgcgctatgccctgtcgctctacacgcaggccaccgacctgctaatcaagacctttgtacagacgcaatcggcccagggcttgggtgtagaagaccctgtgggtgaagtctctgtccatgttgagctgttcactcatccaggaactggggaacacaaggtcacagtgaaagtggtggctgccaatgacctcaagtggcagacttctggcatcttccggccgttcatcgaggtcaacatcattgggccccagctcagcgacaagaaacgcaagtttgcgaccaaatccaagaacaatagctgggctcccaagtacaatgagagcttccagttcacgctgagcgccgacgcgggtcccgagtgctatgagctgcaggtgtgcgtcaaggactactgcttcgcgcgcgaggaccgcacggtggggctggccgtgctgcagctgcgtgagctggcccagcgcgggagcgccgcctgctggctgccgctcggccgccgcatccacatggacgacacgggcctcacggtgctgcgaatcctctcgcagcgcagcaacgacgaggtggccaaggagttcgtgaagctcaagtcggacacgcgctccgccgaggagggcggtgccgcgcctgcgccttagcgcgggcggtcggccgagcggcactgcgcctgcgcggagggcgctgggcggggagggacggggcttgcgccttggtgggacctccccaggggcggggctcggggggctccacgccaagggtgggctgcgcctacgcccttgactcagctttcccttttggggaattaggaatggaggatgccccgccctctcgggaggccacgcccaagggcgcgacgaaggaaggagccacatccccaacttgaggccacgcccccagcacctagggggcattttgagctgggatgggggaaacctcgtccctatggaggaggccacatcccggggctctggtaccgggaggcaccacctcatgtcccctggaaaagccataagatgggacccagacccctgggaccccagaccaattgccaagtatggaaatctcagctccctcgagggggggccctgggcaaggggtagggctctctggagcgcccctctaggtggcctggggactggagggaccaggatgctggttggagggccccggaataccggagtccctttagatatttgtgcaaaaaataaatggggggaggggggaggatgggatttcaaaagcacatgcgcccttgggcgcccaaaccctgggggccgaggggacggctctggttccccacgctgcccctacttccctttgggagtttgcctctccctctcccccaacaaacccagtcctcatatcatagagttcaacacacccatttgacagatggcaaaactgaggcttaaagagctgcttgagacttggccaaggttccaggtgccataccctctgtgcccctcccttaggcctgtgtgccccatggaagggtgggctgagatcgggatgacctgacacagctccctattgctgctaattccccctcggcctcctccaaggggtgggaattccaggccaagacccctacttcgcctttccttctccggctgccaagcaggacctttgccctcagccctttctcctgggatctccatgggggatgccatgagggcctcccaccacaaaagagaatttgggatcccctggtcccaggtttctccatcccttcttccttttccagaattttccaaataggaaagaacagaaggagaccagaaactctaggggggagaaagagaatgagagaaagagaatgagagagagagaaacacaaacacagtgacacagtgagagcttagtctccaagagcctattcattgattcaaacacccaagccacaggatacctcagatggccctcttgccagctggaagctctttctccaatgagcaaagttacagtgacctggctggagttacctggtgcacataggaccttaggggaaagttcagcgtggactacacttgctctgggatctgcttttccacatgtgtgtatggcacgcctttttctgctggattgggaaggacaagattttgctgtgctagggagaaatgaaaacggggtgagctgagtagctgggtttctggaggatagaacatcagatggggaggctttccgaggtgaagaatgagagggaaccacttactagagagaaaagagctccaggcctggggaacagcacgtgcgaaggccaggagagaagaactgttgaaacaacgagaagggtggcacggctggagctgagccagcaagggggatcgtgaggagccttggggttggggagatctgcagaagcatcagaccaggcagggcctcgtacgcagtcctgaggagttttacttttattctaagacagttggggagctccaggagctgttttaagttggggagagactggattccagcctgcaaaagctgttttgtgaagactaaaaccagtgaggagaggtggaggtgctttggggacactgaaatggattcttggaaagattctgaaggctgtgttgaaaagacacctatagctgtggggacatgactataatcccagcatttggggagaccgaggctggcagatcacttaaggtcaggagtttgagaccagcctggccaacatggcgaaaccccatctctgctaaaaatacaaaaattagctgggtgcagtggtgcatgcctgtagtcccagctactcaggagactgaggcgggagaattgtttgaaccctggaggcagaggttgtagtgagtcgtgatcacacaactgcactccagcctgggcaacagaacaatactccattccctcccctctaccccaccaaaaaaaaaaaaaaatcctgcccttagatgagctctagggctgctgagtacagttgtcccagttgcacagtgcccaagggtttggcattgctaagaaggccacgtgcaaatcctagatattgagtgttgtatgtttgtgacgttggtttcccgacatgtgaatggcccaagtgtctggaagaagtggcgccactttctaatttgcttggagatgttgcatgtcccttaaattcagacaggtgcaggtaactggaggttctgaaccaaaggttaaaatgcaaattctcatacagggttgggaagttgtagccagggataagcttatgtgactgttatatggactgaggagcagatgtgaatttcgaaccatgacatggctgagggtaggggtcgggtggatggatgattcagggttgtaacccatagagcccaaaggggaagtgatctgtgacctggggtgagggtgatctggaagatttttggatggctggaaagaaatggggaagtcgagctgcctgagagagccaagttatttcccaaaagattccttaggagtctttctgttcaagacctccgtgtgtgtgtgtgtgtgtttagggttccccagcaatggcccaggcatgtgaaggaaacaagcttcttcagggaatatttgttgaatgagttttcctgactcccaggctagaactgtttttgcaatttccaccctcttttctttcccccagagaactcctattcgtccttcaaaacccatcacggaaacccctcttggagaaaaccctccttccttcccctcaggactttcccagccaccgtctctcctccagtccagcctgatgccatgggactgggggtttctctgtccagctctgtttctcccagactggggtctgaggactctcaggacccccaactttacctagcacaggctgggcacaagtgggtgacagggagtctacgcctagtggaattatgtattggggcagggtcagtgtgagaatacacatccgcatgcatgtctgtccatgtctgtccgtaccaaccttccccttccacacggacctgggcacataggaggtgtctgagcctgacacatgggacagagagtggacatggctgagacacggacagagaaaagacaaggagtccagggggctgaaagccttttgaaatcaggaagttcctgtattggcagaacaaagcccagagaggagcagggctttcctcaacgccacccagcaagtggacacagagcccggccttggatgacacctccagggttctgaaccctggacctcgctttatgcaaggagctggccccacatttccatgaatcggggaaacagcacaagaaggttggcctgtggcagggcaagggttaaaggggtgacattgagggatgcctcagagtcaaagtcccctgaccaagaggaatagagtagaaaacacagagacagagggtgagatcacgccccgatgaggacggagagagacagagatggagagagacatagaggtggaaatatacagagaaagataaatgcagagaccaaggcagggagtgtcgggggaagtaaagagggtgtcctgaagaaagaaggatctgttcactcttaccagtctgtcctcgaatgatttgcataaaatgaggaggtgcctgtccacacccccaattcctctctcaggccccagagcctgagacctcaccatgcccccatcagagatgcaaaaaactaaacacccaactagaaatccttgggacctctctcggctgggatctcagagcctttctgtcccctacccctaccccatgtgctgtcgattttgcagatggggacaacctggggcctcccggaactctgccaccctggggaagttgggggagggccttagtcccggatcacaaccccgtctgctccccagaatcctttcctaagaatcgttgaggaccaaagttgtctttgctgacacgtgttgcttttctctttgccttttattgtttcagagaaaaatcaagttgactgtgtcaagtaacaccccaccccttacccccgtccagccatagtggctctctggagacacaggtcacaggcggagggtcccctgatcatccccaaccacacagccagggggacttgacccctgtccacccctgtctcgtgctccctcagacccccacaaaccggccaagcagtccggggaggcttcccctccacacaactcttagcatgtgattgcagatgtgaaatcaaaacgttgtttgttttttgttttgttttgattctaccccgtcggtccagtgtctgcacagacgccttcatttctctgtaaatatgtgacttggaacaaatgtttaacacaaacgagaagtggtcatgaatgcatggtgttgagatgttttgcactattctgactttttggtctctgtaaaaatattttattaacagcagacattaaaaaaagaaaaaccacacaca

SEQ ID NO: 9588 - RNA, 9973 nt, Homo sapiens
  source 1..9973: mol_type = mRNA
gcccccggtgctgaaccaagatggccggtggcggccgggccccggcgtgagccaagcgcgggctgcagccgggagatgccccagcccagcggccgctgagcccgacccgacagagccggcccggccgcctccggcccacctgcgagctcggagacatgtctctgctttgcgttggagtcaaaaaagccaagtttgatggtgcccaagagaaattcaacacgtacgtgaccctgaaagtgcagaatgtcaagagcacgaccatcgcggtgcggggcagccagcccagctgggagcaggatttcatgttcgagattaaccgtctggatttgggactgacggtggaggtgtggaataagggtctcatctgggacacaatggtgggcactgtgtggatcccactgaggaccatccgccagtccaatgaggagggccctggagagtggctgacgctggactcccaggtcatcatggcagacagtgagatctgtggcaccaaggaccccaccttccaccgcatcctcctggacacgcgctttgagctacccttagacattcctgaagaggaggctcgctactgggccaagaagctggagcagctcaatgctatgcgggaccaggatgaatattcgttccaagatgagcaagacaagcctctgcctgtccccagcaaccagtgctgcaactggaattattttggctggggtgagcagcacaacgatgaccccgacagtgcagtggatgatcgtgacagtgactaccgcagtgaaacgagcaacagcatcccgccgccctattatactacgtcacaacccaacgcctcagtccaccaatattctgttcgcccaccacccctgggctcccgggagtcctacagtgactccatgcacagttacgaggagttctctgagccacaagccctcagccccacgggtagcagccgctatgcctcttccggggagctgagccagggaagctctcagctgagcgaggacttcgaccctgacgagcacagcctgcagggctccgacatggaggatgagcgggaccgggactcctaccactcctgccacagctcggtcagctaccacaaagactcgcctcgctgggaccaggatgaggaagagctggaggaggacctggaggacttcctggaggaggaggagctgcctgaagatgaggaggagctggaggaggaggaggaggaggtgcctgacgatttgggcagctatgcccagcgtgaagacgtagctgtggctgagcccaaagacttcaaacgcatcagcctcccgccagctgccccagggaaggaggacaaggccccagtggcacccaccgaggcccccgacatggccaaggtggcccccaagccagccacgcccgacaaggtgcctgcagctgagcagatccctgaggctgagccacccaaggacgaggagagtttcaggccgagagaggatgaggaaggccaggaggggcaggactccatgtccagggccaaggccaactggctgcgtgccttcaacaaggtgcggatgcagctgcaggaggcccggggagaaggagagatgtctaaatccctatggttcaaaggcggcccagggggcggtctcatcatcatcgacagcatgccagacatccgcaagaggaaacctatcccactcgtgagcgacttgtccctggtccagtccaggaaagcgggcatcacctcggccttggcctccagcacgttgaacaacgaggagctgaaaaaccacgtttacaagaagaccctgcaagccttaatctaccccatctcgtgcacgacgccacacaacttcgaagtgtggacggccaccacgcccacctactgctacgagtgcgaggggctgctgtggggcatcgcgaggcagggcatgcgctgcaccgagtgcggtgtcaagtgccacgagaagtgccaggacctgctcaacgccgactgcctgcagcgggctgcggagaagagctccaagcacggggcggaggaccggacacagaacatcatcatggtgctcaaggaccgcatgaagatccgggagcgcaacaagcccgagatcttcgagctcatccaggagatcttcgcggtgaccaagacggcgcacacgcagcagatgaaggcggtcaagcagagcgtgctggacggcacgtccaagtggtccgccaagatcagcatcaccgtggtctgcgcccagggcttgcaggcaaaggacaagacaggatccagtgacccctatgtcaccgtccaggtcgggaagaccaagaaacggacaaaaaccatctatgggaacctcaacccggtgtgggaggagaatttccactttgaatgtcacaattcctccgaccgcatcaaggtgcgcgtctgggacgaggatgacgacatcaaatcccgcgtgaaacagaggttcaagagggaatctgacgatttcctggggcagacgatcattgaggtgcggacgctcagcggcgagatggacgtgtggtacaacctggacaagcgaactgacaaatctgccgtgtcgggtgccatccggctccacatcagtgtggagatcaaaggcgaggagaaggtggccccgtaccatgtccagtacacctgtctgcatgagaacctgttccacttcgtgaccgacgtgcagaacaatggggtcgtgaagatcccagatgccaagggtgacgatgcctggaaggtttactacgatgagacagcccaggagattgtggacgagtttgccatgcgctacggcgtcgagtccatctaccaagccatgacccactttgcctgcctctcctccaagtatatgtgcccaggggtgcctgccgtcatgagcaccctgctcgccaacatcaatgcctactacgcacacaccaccgcctccaccaacgtgtctgcctccgaccgcttcgccgcctccaactttgggaaagagcgcttcgtgaaactcctggaccagctgcataactccctgcggattgacctctccatgtaccggaataacttcccagccagcagcccggagagactccaggacctcaaatccactgtggaccttctcaccagcatcaccttctttcggatgaaggtacaagaactccagagcccgccccgagccagccaggtggtaaaggactgtgtgaaagcctgccttaattctacctacgagtacatcttcaataactgccatgaactgtacagccgggagtaccagacagacccggccaagaagggggaagttctcccagaggaacaggggcccagcatcaagaacctcgacttctggtccaagctgattaccctcatagtgtccatcattgaggaagacaagaattcctacactccctgcctcaaccagtttccccaggagctgaatgtgggtaaaatcagcgctgaagtgatgtggaatctgtttgcccaagacatgaagtacgccatggaggagcacgacaagcatcgtctatgcaagagtgccgactacatgaacctccacttcaaggtgaaatggctctacaatgagtatgtgacggaacttcccgccttcaaggaccgcgtgcctgagtaccctgcatggtttgaacccttcgtcatccagtggctggatgagaatgaggaggtgtcccgggatttcctgcacggtgccctggagcgagacaagaaggatgggttccagcagacctcagagcatgccctattctcctgctccgtggtggatgttttctcccaactcaaccagagctttgaaatcatcaagaaactcgagtgtcccgaccctcagatcgtggggcactacatgaggcgctttgccaagaccatcagtaatgtgctcctccagtatgcagacatcatctccaaggactttgcctcctactgctccaaggagaaggagaaagtgccctgcattctcatgaataacactcaacagctacgagttcagctggagaagatgttcgaagccatgggaggaaaggagctggatgctgaagccagtgacatcctgaaggagcttcaggtgaaactcaataacgtcttggatgagctcagccgggtgtttgctaccagcttccagccgcacattgaagagtgtgtcaaacagatgggtgacatccttagccaggttaagggcacaggcaatgtgccagccagtgcctgcagcagcgtggcccaggacgcggacaatgtgttgcagcccatcatggacctgctggacagcaacctgaccctctttgccaaaatctgtgagaagactgtgctgaagcgagtgctgaaggagctgtggaagctggttatgaacaccatggagaaaaccatcgtcctgccgcccctcactgaccagacggggaacctcttgagaaaacatggcaagggattagaaaagggcagggtgaaattgccaagccactcagacggaacccagatgatcttcaatgcagccaaggagctgggtcagctgtccaaactcaaggatcacatggtacgagaagaagccaagagcttgaccccaaagcagtgcgcggttgttgagttggccctggacaccatcaagcaatatttccacgcgggtggcgtgggcctcaagaagaccttcctggagaagagcccggacctgcaatccttgcgctatgccctgtcgctctacacgcaggccaccgacctgctaatcaagacctttgtacagacgcaatcggcccagggcttgggtgtagaagaccctgtgggtgaagtctctgtccatgttgagctgttcactcatccaggaactggggaacacaaggtcacagtgaaagtggtggctgccaatgacctcaagtggcagacttctggcatcttccggccgttcatcgaggtcaacatcattgggccccagctcagcgacaagaaacgcaagtttgcgaccaaatccaagaacaatagctgggctcccaagtacaatgagagcttccagttcacgctgagcgccgacgcgggtcccgagtgctatgagctgcaggtgtgcgtcaaggactactgcttcgcgcgcgaggaccgcacggtggggctggccgtgctgcagctgcgtgagctggcccagcgcgggagcgccgcctgctggctgccgctcggccgccgcatccacatggacgacacgggcctcacggtgctgcgaatcctctcgcagcgcagcaacgacgaggtggccaaggagttcgtgaagctcaagtcggacacgcgctccgccgaggagggcggtgccgcgcctgcgccttagcgcgggcggtcggccgagcggcactgcgcctgcgcggagggcgctgggcggggagggacggggcttgcgccttggtgggacctccccaggggcggggctcggggggctccacgccaagggtgggctgcgcctacgcccttgactcagctttcccttttggggaattaggaatggaggatgccccgccctctcgggaggccacgcccaagggcgcgacgaaggaaggagccacatccccaacttgaggccacgcccccagcacctagggggcattttgagctgggatgggggaaacctcgtccctatggaggaggccacatcccggggctctggtaccgggaggcaccacctcatgtcccctggaaaagccataagatgggacccagacccctgggaccccagaccaattgccaagtatggaaatctcagctccctcgagggggggccctgggcaaggggtagggctctctggagcgcccctctaggtggcctggggactggagggaccaggatgctggttggagggccccggaataccggagtccctttagatatttgtgcaaaaaataaatggggggaggggggaggatgggatttcaaaagcacatgcgcccttgggcgcccaaaccctgggggccgaggggacggctctggttccccacgctgcccctacttccctttgggagtttgcctctccctctcccccaacaaacccagtcctcatatcatagagttcaacacacccatttgacagatggcaaaactgaggcttaaagagctgcttgagacttggccaaggttccaggtgccataccctctgtgcccctcccttaggcctgtgtgccccatggaagggtgggctgagatcgggatgacctgacacagctccctattgctgctaattccccctcggcctcctccaaggggtgggaattccaggccaagacccctacttcgcctttccttctccggctgccaagcaggacctttgccctcagccctttctcctgggatctccatgggggatgccatgagggcctcccaccacaaaagagaatttgggatcccctggtcccaggtttctccatcccttcttccttttccagaattttccaaataggaaagaacagaaggagaccagaaactctaggggggagaaagagaatgagagaaagagaatgagagagagagaaacacaaacacagtgacacagtgagagcttagtctccaagagcctattcattgattcaaacacccaagccacaggatacctcagatggccctcttgccagctggaagctctttctccaatgagcaaagttacagtgacctggctggagttacctggtgcacataggaccttaggggaaagttcagcgtggactacacttgctctgggatctgcttttccacatgtgtgtatggcacgcctttttctgctggattgggaaggacaagattttgctgtgctagggagaaatgaaaacggggtgagctgagtagctgggtttctggaggatagaacatcagatggggaggctttccgaggtgaagaatgagagggaaccacttactagagagaaaagagctccaggcctggggaacagcacgtgcgaaggccaggagagaagaactgttgaaacaacgagaagggtggcacggctggagctgagccagcaagggggatcgtgaggagccttggggttggggagatctgcagaagcatcagaccaggcagggcctcgtacgcagtcctgaggagttttacttttattctaagacagttggggagctccaggagctgttttaagttggggagagactggattccagcctgcaaaagctgttttgtgaagactaaaaccagtgaggagaggtggaggtgctttggggacactgaaatggattcttggaaagattctgaaggctgtgttgaaaagacacctatagctgtggggacatgactataatcccagcatttggggagaccgaggctggcagatcacttaaggtcaggagtttgagaccagcctggccaacatggcgaaaccccatctctgctaaaaatacaaaaattagctgggtgcagtggtgcatgcctgtagtcccagctactcaggagactgaggcgggagaattgtttgaaccctggaggcagaggttgtagtgagtcgtgatcacacaactgcactccagcctgggcaacagaacaatactccattccctcccctctaccccaccaaaaaaaaaaaaaaatcctgcccttagatgagctctagggctgctgagtacagttgtcccagttgcacagtgcccaagggtttggcattgctaagaaggccacgtgcaaatcctagatattgagtgttgtatgtttgtgacgttggtttcccgacatgtgaatggcccaagtgtctggaagaagtggcgccactttctaatttgcttggagatgttgcatgtcccttaaattcagacaggtgcaggtaactggaggttctgaaccaaaggttaaaatgcaaattctcatacagggttgggaagttgtagccagggataagcttatgtgactgttatatggactgaggagcagatgtgaatttcgaaccatgacatggctgagggtaggggtcgggtggatggatgattcagggttgtaacccatagagcccaaaggggaagtgatctgtgacctggggtgagggtgatctggaagatttttggatggctggaaagaaatggggaagtcgagctgcctgagagagccaagttatttcccaaaagattccttaggagtctttctgttcaagacctccgtgtgtgtgtgtgtgtgtttagggttccccagcaatggcccaggcatgtgaaggaaacaagcttcttcagggaatatttgttgaatgagttttcctgactcccaggctagaactgtttttgcaatttccaccctcttttctttcccccagagaactcctattcgtccttcaaaacccatcacggaaacccctcttggagaaaaccctccttccttcccctcaggactttcccagccaccgtctctcctccagtccagcctgatgccatgggactgggggtttctctgtccagctctgtttctcccagactggggtctgaggactctcaggacccccaactttacctagcacaggctgggcacaagtgggtgacagggagtctacgcctagtggaattatgtattggggcagggtcagtgtgagaatacacatccgcatgcatgtctgtccatgtctgtccgtaccaaccttccccttccacacggacctgggcacataggaggtgtctgagcctgacacatgggacagagagtggacatggctgagacacggacagagaaaagacaaggagtccagggggctgaaagccttttgaaatcaggaagttcctgtattggcagaacaaagcccagagaggagcagggctttcctcaacgccacccagcaagtggacacagagcccggccttggatgacacctccagggttctgaaccctggacctcgctttatgcaaggagctggccccacatttccatgaatcggggaaacagcacaagaaggttggcctgtggcagggcaagggttaaaggggtgacattgagggatgcctcagagtcaaagtcccctgaccaagaggaatagagtagaaaacacagagacagagggtgagatcacgccccgatgaggacggagagagacagagatggagagagacatagaggtggaaatatacagagaaagataaatgcagagaccaaggcagggagtgtcgggggaagtaaagagggtgtcctgaagaaagaaggatctgttcactcttaccagtctgtcctcgaatgatttgcataaaatgaggaggtgcctgtccacacccccaattcctctctcaggccccagagcctgagacctcaccatgcccccatcagagatgcaaaaaactaaacacccaactagaaatccttgggacctctctcggctgggatctcagagcctttctgtcccctacccctaccccatgtgctgtcgattttgcagatggggacaacctggggcctcccggaactctgccaccctggggaagttgggggagggccttagtcccggatcacaaccccgtctgctccccagaatcctttcctaagaatcgttgaggaccaaagttgtctttgctgacacgtgttgcttttctctttgccttttattgtttcagagaaaaatcaagttgactgtgtcaagtaacaccccaccccttacccccgtccagccatagtggctctctggagacacaggtcacaggcggagggtcccctgatcatccccaaccacacagccagggggacttgacccctgtccacccctgtctcgtgctccctcagacccccacaaaccggccaagcagtccggggaggcttcccctccacacaactcttagcatgtgattgcagatgtgaaatcaaaacgttgtttgttttttgttttgttttgattctaccccgtcggtccagtgtctgcacagacgccttcatttctctgtaaatatgtgacttggaacaaatgtttaacacaaacgagaagtggtcatgaatgcatggtgttgagatgttttgcactattctgactttttggtctctgtaaaaatattttattaacagcagacattaaaaaaagaaaaaccacacaca

SEQ ID NO: 9589 - RNA, 9970 nt, Homo sapiens
  source 1..9970: mol_type = mRNA
gcccccggtgctgaaccaagatggccggtggcggccgggccccggcgtgagccaagcgcgggctgcagccgggagatgccccagcccagcggccgctgagcccgacccgacagagccggcccggccgcctccggcccacctgcgagctcggagacatgtctctgctttgcgttggagtcaaaaaagccaagtttgatggtgcccaagagaaattcaacacgtacgtgaccctgaaagtgcagaatgtcaagagcacgaccatcgcggtgcggggcagccagcccagctgggagcaggatttcatgttcgagattaaccgtctggatttgggactgacggtggaggtgtggaataagggtctcatctgggacacaatggtgggcactgtgtggatcccactgaggaccatccgccagtccaatgaggagggccctggagagtggctgacgctggactcccaggtcatcatggcagacagtgagatctgtggcaccaaggaccccaccttccaccgcatcctcctggacacgcgctttgagctacccttagacattcctgaagaggaggctcgctactgggccaagaagctggagcagctcaatgctatgcgggaccaggatgaatattcgttccaagatgagcaagacaagcctctgcctgtccccagcaaccagtgctgcaactggaattattttggctggggtgagcagcacaacgatgaccccgacagtgcagtggatgatcgtgacagtgactaccgcagtgaaacgagcaacagcatcccgccgccctattatactacgtcacaacccaacgcctcagtccaccaatattctgttcgcccaccacccctgggctcccgggagtcctacagtgactccatgcacagttacgaggagttctctgagccacaagccctcagccccacgggtagcagccgctatgcctcttccggggagctgagccagggaagctctcagctgagcgaggacttcgaccctgacgagcacagcctgcagggctccgacatggaggatgagcgggaccgggactcctaccactcctgccacagctcggtcagctaccacaaagactcgcctcgctgggaccaggatgaggaagagctggaggaggacctggaggacttcctggaggaggaggagctgcctgaagatgaggaggagctggaggaggaggaggaggaggtgcctgacgatttgggcagctatgcccagcgtgaagacgtagctgtggctgagcccaaagacttcaaacgcatcagcctcccgccagctgccccagggaaggaggacaaggccccagtggcacccaccgaggcccccgacatggccaaggtggcccccaagccagccacgcccgacaaggtgcctgcagctgagcagatccctgaggctgagccacccaaggacgaggagagtttcaggccgagagaggatgaggaaggccaggaggggcaggactccatgtccagggccaaggccaactggctgcgtgccttcaacaaggtgcggatgcagctgcaggaggcccggggagaaggagagatgtctaaatccctatggttcaaaggcggcccagggggcggtctcatcatcatcgacagcatgccagacatccgcaagaggaaacctatcccactcgtgagcgacttgtccctggtccagtccaggaaagcgggcatcacctcggccttggcctccagcacgttgaacaacgaggagctgaaaaaccacgtttacaagaagaccctgcaagccttaatctaccccatctcgtgcacgacgccacacaacttcgaagtgtggacggccaccacgcccacctactgctacgagtgcgaggggctgctgtggggcatcgcgaggcagggcatgcgctgcaccgagtgcggtgtcaagtgccacgagaagtgccaggacctgctcaacgccgactgcctgcagcgggctgcggagaagagctccaagcacggggcggaggaccggacacagaacatcatcatggtgctcaaggaccgcatgaagatccgggagcgcaacaagcccgagatcttcgagctcatccaggagatcttcgcggtgaccaagacggcgcacacgcagcagatgaaggcggtcaagcagagcgtgctggacggcacgtccaagtggtccgccaagatcagcatcaccgtggtctgcgcccagggcttgcaggcaaaggacaagacaggatccagtgacccctatgtcaccgtccaggtcgggaagaccaagaaacggacaaaaaccatctatgggaacctcaacccggtgtgggaggagaatttccactttgaatgtcacaattcctccgaccgcatcaaggtgcgcgtctgggacgaggatgacgacatcaaatcccgcgtgaaacagaggttcaagagggaatctgacgatttcctggggcagacgatcattgaggtgcggacgctcagcggcgagatggacgtgtggtacaacctggacaagcgaactgacaaatctgccgtgtcgggtgccatccggctccacatcagtgtggagatcaaaggcgaggagaaggtggccccgtaccatgtccagtacacctgtctgcatgagaacctgttccacttcgtgaccgacgtgcagaacaatggggtcgtgaagatcccagatgccaagggtgacgatgcctggaaggtttactacgatgagacagcccaggagattgtggacgagtttgccatgcgctacggcgtcgagtccatctaccaagccatgacccactttgcctgcctctcctccaagtatatgtgcccaggggtgcctgccgtcatgagcaccctgctcgccaacatcaatgcctactacgcacacaccaccgcctccaccaacgtgtctgcctccgaccgcttcgccgcctccaactttgggaaagagcgcttcgtgaaactcctggaccagctgcataactccctgcggattgacctctccatgtaccggaataacttcccagccagcagcccggagagactccaggacctcaaatccactgtggaccttctcaccagcatcaccttctttcggatgaaggtacaagaactccagagcccgccccgagccagccaggtggtaaaggactgtgtgaaagcctgccttaattctacctacgagtacatcttcaataactgccatgaactgtacagccgggagtaccagacagacccggccaagaagggggaagttctcccagaggaacaggggcccagcatcaagaacctcgacttctggtccaagctgattaccctcatagtgtccatcattgaggaagacaagaattcctacactccctgcctcaaccagtttccccaggagctgaatgtgggtaaaatcagcgctgaagtgatgtggaatctgtttgcccaagacatgaagtacgccatggaggagcacgacaagcatcgtctatgcaagagtgccgactacatgaacctccacttcaaggtgaaatggctctacaatgagtatgtgacggaacttcccgccttcaaggaccgcgtgcctgagtaccctgcatggtttgaacccttcgtcatccagtggctggatgagaatgaggaggtgtcccgggatttcctgcacggtgccctggagcgagacaagaaggatgggttccagcagacctcagagcatgccctattctcctgctccgtggtggatgttttctcccaactcaaccagagctttgaaatcatcaagaaactcgagtgtcccgaccctcagatcgtggggcactacatgaggcgctttgccaagaccatcagtaatgtgctcctccagtatgcagacatcatctccaaggactttgcctcctactgctccaaggagaaggagaaaccctgcattctcatgaataacactcaacagctacgagttcagctggagaagatgttcgaagccatgggaggaaaggagctggatgctgaagccagtgacatcctgaaggagcttcaggtgaaactcaataacgtcttggatgagctcagccgggtgtttgctaccagcttccagccgcacattgaagagtgtgtcaaacagatgggtgacatccttagccaggttaagggcacaggcaatgtgccagccagtgcctgcagcagcgtggcccaggacgcggacaatgtgttgcagcccatcatggacctgctggacagcaacctgaccctctttgccaaaatctgtgagaagactgtgctgaagcgagtgctgaaggagctgtggaagctggttatgaacaccatggagaaaaccatcgtcctgccgcccctcactgaccagacggggaacctcttgagaaaacatggcaagggattagaaaagggcagggtgaaattgccaagccactcagacggaacccagatgatcttcaatgcagccaaggagctgggtcagctgtccaaactcaaggatcacatggtacgagaagaagccaagagcttgaccccaaagcagtgcgcggttgttgagttggccctggacaccatcaagcaatatttccacgcgggtggcgtgggcctcaagaagaccttcctggagaagagcccggacctgcaatccttgcgctatgccctgtcgctctacacgcaggccaccgacctgctaatcaagacctttgtacagacgcaatcggcccagggcttgggtgtagaagaccctgtgggtgaagtctctgtccatgttgagctgttcactcatccaggaactggggaacacaaggtcacagtgaaagtggtggctgccaatgacctcaagtggcagacttctggcatcttccggccgttcatcgaggtcaacatcattgggccccagctcagcgacaagaaacgcaagtttgcgaccaaatccaagaacaatagctgggctcccaagtacaatgagagcttccagttcacgctgagcgccgacgcgggtcccgagtgctatgagctgcaggtgtgcgtcaaggactactgcttcgcgcgcgaggaccgcacggtggggctggccgtgctgcagctgcgtgagctggcccagcgcgggagcgccgcctgctggctgccgctcggccgccgcatccacatggacgacacgggcctcacggtgctgcgaatcctctcgcagcgcagcaacgacgaggtggccaaggagttcgtgaagctcaagtcggacacgcgctccgccgaggagggcggtgccgcgcctgcgccttagcgcgggcggtcggccgagcggcactgcgcctgcgcggagggcgctgggcggggagggacggggcttgcgccttggtgggacctccccaggggcggggctcggggggctccacgccaagggtgggctgcgcctacgcccttgactcagctttcccttttggggaattaggaatggaggatgccccgccctctcgggaggccacgcccaagggcgcgacgaaggaaggagccacatccccaacttgaggccacgcccccagcacctagggggcattttgagctgggatgggggaaacctcgtccctatggaggaggccacatcccggggctctggtaccgggaggcaccacctcatgtcccctggaaaagccataagatgggacccagacccctgggaccccagaccaattgccaagtatggaaatctcagctccctcgagggggggccctgggcaaggggtagggctctctggagcgcccctctaggtggcctggggactggagggaccaggatgctggttggagggccccggaataccggagtccctttagatatttgtgcaaaaaataaatggggggaggggggaggatgggatttcaaaagcacatgcgcccttgggcgcccaaaccctgggggccgaggggacggctctggttccccacgctgcccctacttccctttgggagtttgcctctccctctcccccaacaaacccagtcctcatatcatagagttcaacacacccatttgacagatggcaaaactgaggcttaaagagctgcttgagacttggccaaggttccaggtgccataccctctgtgcccctcccttaggcctgtgtgccccatggaagggtgggctgagatcgggatgacctgacacagctccctattgctgctaattccccctcggcctcctccaaggggtgggaattccaggccaagacccctacttcgcctttccttctccggctgccaagcaggacctttgccctcagccctttctcctgggatctccatgggggatgccatgagggcctcccaccacaaaagagaatttgggatcccctggtcccaggtttctccatcccttcttccttttccagaattttccaaataggaaagaacagaaggagaccagaaactctaggggggagaaagagaatgagagaaagagaatgagagagagagaaacacaaacacagtgacacagtgagagcttagtctccaagagcctattcattgattcaaacacccaagccacaggatacctcagatggccctcttgccagctggaagctctttctccaatgagcaaagttacagtgacctggctggagttacctggtgcacataggaccttaggggaaagttcagcgtggactacacttgctctgggatctgcttttccacatgtgtgtatggcacgcctttttctgctggattgggaaggacaagattttgctgtgctagggagaaatgaaaacggggtgagctgagtagctgggtttctggaggatagaacatcagatggggaggctttccgaggtgaagaatgagagggaaccacttactagagagaaaagagctccaggcctggggaacagcacgtgcgaaggccaggagagaagaactgttgaaacaacgagaagggtggcacggctggagctgagccagcaagggggatcgtgaggagccttggggttggggagatctgcagaagcatcagaccaggcagggcctcgtacgcagtcctgaggagttttacttttattctaagacagttggggagctccaggagctgttttaagttggggagagactggattccagcctgcaaaagctgttttgtgaagactaaaaccagtgaggagaggtggaggtgctttggggacactgaaatggattcttggaaagattctgaaggctgtgttgaaaagacacctatagctgtggggacatgactataatcccagcatttggggagaccgaggctggcagatcacttaaggtcaggagtttgagaccagcctggccaacatggcgaaaccccatctctgctaaaaatacaaaaattagctgggtgcagtggtgcatgcctgtagtcccagctactcaggagactgaggcgggagaattgtttgaaccctggaggcagaggttgtagtgagtcgtgatcacacaactgcactccagcctgggcaacagaacaatactccattccctcccctctaccccaccaaaaaaaaaaaaaaatcctgcccttagatgagctctagggctgctgagtacagttgtcccagttgcacagtgcccaagggtttggcattgctaagaaggccacgtgcaaatcctagatattgagtgttgtatgtttgtgacgttggtttcccgacatgtgaatggcccaagtgtctggaagaagtggcgccactttctaatttgcttggagatgttgcatgtcccttaaattcagacaggtgcaggtaactggaggttctgaaccaaaggttaaaatgcaaattctcatacagggttgggaagttgtagccagggataagcttatgtgactgttatatggactgaggagcagatgtgaatttcgaaccatgacatggctgagggtaggggtcgggtggatggatgattcagggttgtaacccatagagcccaaaggggaagtgatctgtgacctggggtgagggtgatctggaagatttttggatggctggaaagaaatggggaagtcgagctgcctgagagagccaagttatttcccaaaagattccttaggagtctttctgttcaagacctccgtgtgtgtgtgtgtgtgtttagggttccccagcaatggcccaggcatgtgaaggaaacaagcttcttcagggaatatttgttgaatgagttttcctgactcccaggctagaactgtttttgcaatttccaccctcttttctttcccccagagaactcctattcgtccttcaaaacccatcacggaaacccctcttggagaaaaccctccttccttcccctcaggactttcccagccaccgtctctcctccagtccagcctgatgccatgggactgggggtttctctgtccagctctgtttctcccagactggggtctgaggactctcaggacccccaactttacctagcacaggctgggcacaagtgggtgacagggagtctacgcctagtggaattatgtattggggcagggtcagtgtgagaatacacatccgcatgcatgtctgtccatgtctgtccgtaccaaccttccccttccacacggacctgggcacataggaggtgtctgagcctgacacatgggacagagagtggacatggctgagacacggacagagaaaagacaaggagtccagggggctgaaagccttttgaaatcaggaagttcctgtattggcagaacaaagcccagagaggagcagggctttcctcaacgccacccagcaagtggacacagagcccggccttggatgacacctccagggttctgaaccctggacctcgctttatgcaaggagctggccccacatttccatgaatcggggaaacagcacaagaaggttggcctgtggcagggcaagggttaaaggggtgacattgagggatgcctcagagtcaaagtcccctgaccaagaggaatagagtagaaaacacagagacagagggtgagatcacgccccgatgaggacggagagagacagagatggagagagacatagaggtggaaatatacagagaaagataaatgcagagaccaaggcagggagtgtcgggggaagtaaagagggtgtcctgaagaaagaaggatctgttcactcttaccagtctgtcctcgaatgatttgcataaaatgaggaggtgcctgtccacacccccaattcctctctcaggccccagagcctgagacctcaccatgcccccatcagagatgcaaaaaactaaacacccaactagaaatccttgggacctctctcggctgggatctcagagcctttctgtcccctacccctaccccatgtgctgtcgattttgcagatggggacaacctggggcctcccggaactctgccaccctggggaagttgggggagggccttagtcccggatcacaaccccgtctgctccccagaatcctttcctaagaatcgttgaggaccaaagttgtctttgctgacacgtgttgcttttctctttgccttttattgtttcagagaaaaatcaagttgactgtgtcaagtaacaccccaccccttacccccgtccagccatagtggctctctggagacacaggtcacaggcggagggtcccctgatcatccccaaccacacagccagggggacttgacccctgtccacccctgtctcgtgctccctcagacccccacaaaccggccaagcagtccggggaggcttcccctccacacaactcttagcatgtgattgcagatgtgaaatcaaaacgttgtttgttttttgttttgttttgattctaccccgtcggtccagtgtctgcacagacgccttcatttctctgtaaatatgtgacttggaacaaatgtttaacacaaacgagaagtggtcatgaatgcatggtgttgagatgttttgcactattctgactttttggtctctgtaaaaatattttattaacagcagacattaaaaaaagaaaaaccacacaca

SEQ ID NO: 9590 - RNA, 9904 nt, Homo sapiens
  source 1..9904: mol_type = mRNA
gcccccggtgctgaaccaagatggccggtggcggccgggccccggcgtgagccaagcgcgggctgcagccgggagatgccccagcccagcggccgctgagcccgacccgacagagccggcccggccgcctccggcccacctgcgagctcggagacatgtctctgctttgcgttggagtcaaaaaagccaagtttgatggtgcccaagagaaattcaacacgtacgtgaccctgaaagtgcagaatgtcaagagcacgaccatcgcggtgcggggcagccagcccagctgggagcaggatttcatgttcgagattaaccgtctggatttgggactgacggtggaggtgtggaataagggtctcatctgggacacaatggtgggcactgtgtggatcccactgaggaccatccgccagtccaatgaggagggccctggagagtggctgacgctggactcccaggtcatcatggcagacagtgagatctgtggcaccaaggaccccaccttccaccgcatcctcctggacacgcgctttgagctacccttagacattcctgaagaggaggctcgctactgggccaagaagctggagcagctcaatgctatgcgggaccaggatgaatattcgttccaagatgagcaagacaagcctctgcctgtccccagcaaccagtgctgcaactggaattattttggctggggtgagcagcacaacgatgaccccgacagtgcagtggatgatcgtgacagtgactaccgcagtgaaacgagcaacagcatcccgccgccctattatactacgtcacaacccaacgcctcagtccaccaatattctgttcgcccaccacccctgggctcccgggagtcctacagtgactccatgcacagttacgaggagttctctgagccacaagccctcagccccacgggtagcagccgctatgcctcttccggggagctgagccagggaagctctcagctgagcgaggacttcgaccctgacgagcacagcctgcagggctccgacatggaggatgagcgggaccgggactcctaccactcctgccacagctcggtcagctaccacaaagactcgcctcgctgggaccaggatgaggaagagctggaggaggacctggaggacttcctggaggaggaggagctgcctgaagatgaggaggagctggaggaggaggaggaggaggtgcctgacgatttgggcagctatgcccagcgtgaagacgtagctgtggctgagcccaaagacttcaaacgcatcagcctcccgccagctgccccagggaaggaggacaaggccccagtggcacccaccgaggcccccgacatggccaaggtggcccccaagccagccacgcccgacaaggtgcctgcagctgagcagatccctgaggctgagccacccaaggacgaggagagtttcaggccgagagaggatgaggaaggccaggaggggcaggactccatgtccagggccaaggccaactggctgcgtgccttcaacaaggtgcggatgcagctgcaggaggcccggggagaaggagagatgtctaaatccctatggttcaaaggcggcccagggggcggtctcatcatcatcgacagcatgccagacatccgcaagaggaaacctatcccactcgtgagcgacttgtccctggtccagtccaggaaagcgggcatcacctcggccttggcctccagcacgttgaacaacgaggagctgaaaaaccacgtttacaagaagaccctgcaagccttaatctaccccatctcgtgcacgacgccacacaacttcgaagtgtggacggccaccacgcccacctactgctacgagtgcgaggggctgctgtggggcatcgcgaggcagggcatgcgctgcaccgagtgcggtgtcaagtgccacgagaagtgccaggacctgctcaacgccgactgcctgcagcgggctgcggagaagagctccaagcacggggcggaggaccggacacagaacatcatcatggtgctcaaggaccgcatgaagatccgggagcgcaacaagcccgagatcttcgagctcatccaggagatcttcgcggtgaccaagacggcgcacacgcagcagatgaaggcggtcaagcagagcgtgctggacggcacgtccaagtggtccgccaagatcagcatcaccgtggtctgcgcccagggcttgcaggcaaaggacaagacaggatccagtgacccctatgtcaccgtccaggtcgggaagaccaagaaacggacaaaaaccatctatgggaacctcaacccggtgtgggaggagaatttccactttgaatgtcacaattcctccgaccgcatcaaggtgcgcgtctgggacgaggatgacgacatcaaatcccgcgtgaaacagaggttcaagagggaatctgacgatttcctggggcagacgatcattgaggtgcggacgctcagcggcgagatggacgtgtggtacaacctggacaagcgaactgacaaatctgccgtgtcgggtgccatccggctccacatcagtgtggagatcaaaggcgaggagaaggtggccccgtaccatgtccagtacacctgtctgcatgagaacctgttccacttcgtgaccgacgtgcagaacaatggggtcgtgaagatcccagatgccaagggtgacgatgcctggaaggtttactacgatgagacagcccaggagattgtggacgagtttgccatgcgctacggcgtcgagtccatctaccaagccatgacccactttgcctgcctctcctccaagtatatgtgcccaggggtgcctgccgtcatgagcaccctgctcgccaacatcaatgcctactacgcacacaccaccgcctccaccaacgtgtctgcctccgaccgcttcgccgcctccaactttgggaaagagcgcttcgtgaaactcctggaccagctgcataactccctgcggattgacctctccatgtaccggaataacttcccagccagcagcccggagagactccaggacctcaaatccactgtggaccttctcaccagcatcaccttctttcggatgaaggtacaagaactccagagcccgccccgagccagccaggtggtaaaggactgtgtgaaagcctgccttaattctacctacgagtacatcttcaataactgccatgaactgtacagccgggagtaccagacagacccggccaagaagggggaagttctcccagaggaacaggggcccagcatcaagaacctcgacttctggtccaagctgattaccctcatagtgtccatcattgaggaagacaagaattcctacactccctgcctcaaccagtttccccaggagctgaatgtgggtaaaatcagcgctgaagtgatgtggaatctgtttgcccaagacatgaagtacgccatggaggagcacgacaagcatcgtctatgcaagagtgccgactacatgaacctccacttcaaggtgaaatggctctacaatgagtatgtgacggaacttcccgccttcaaggaccgcgtgcctgagtaccctgcatggtttgaacccttcgtcatccagtggctggatgagaatgaggaggtgtcccgggatttcctgcacggtgccctggagcgagacaagaaggatgggttccagcagacctcagagcatgccctattctcctgctccgtggtggatgttttctcccaactcaaccagagctttgaaatcatcaagaaactcgagtgtcccgaccctcagatcgtggggcactacatgaggcgctttgccaagaccatcagtaatgtgctcctccagtatgcagacatcatctccaaggactttgcctcctactgctccaaggagaaggagaaagtgccctgcattctcatgaataacactcaacagctacgagttcagctggagaagatgttcgaagccatgggaggaaaggagctggatgctgaagccagtgacatcctgaaggagcttcaggtgaaactcaataacgtcttggatgagctcagccgggtgtttgctaccagcttccagccgcacattgaagagtgtgtcaaacagatgggtgacatccttagccaggttaagggcacaggcaatgtgccagccagtgcctgcagcagcgtggcccaggacgcggacaatgtgttgcagcccatcatggacctgctggacagcaacctgaccctctttgccaaaatctgtgagaagactgtgctgaagcgagtgctgaaggagctgtggaagctggttatgaacaccatggagaaaaccatcgtcctgccgcccctcactgaccagacgggaacccagatgatcttcaatgcagccaaggagctgggtcagctgtccaaactcaaggatcacatggtacgagaagaagccaagagcttgaccccaaagcagtgcgcggttgttgagttggccctggacaccatcaagcaatatttccacgcgggtggcgtgggcctcaagaagaccttcctggagaagagcccggacctgcaatccttgcgctatgccctgtcgctctacacgcaggccaccgacctgctaatcaagacctttgtacagacgcaatcggcccagggcttgggtgtagaagaccctgtgggtgaagtctctgtccatgttgagctgttcactcatccaggaactggggaacacaaggtcacagtgaaagtggtggctgccaatgacctcaagtggcagacttctggcatcttccggccgttcatcgaggtcaacatcattgggccccagctcagcgacaagaaacgcaagtttgcgaccaaatccaagaacaatagctgggctcccaagtacaatgagagcttccagttcacgctgagcgccgacgcgggtcccgagtgctatgagctgcaggtgtgcgtcaaggactactgcttcgcgcgcgaggaccgcacggtggggctggccgtgctgcagctgcgtgagctggcccagcgcgggagcgccgcctgctggctgccgctcggccgccgcatccacatggacgacacgggcctcacggtgctgcgaatcctctcgcagcgcagcaacgacgaggtggccaaggagttcgtgaagctcaagtcggacacgcgctccgccgaggagggcggtgccgcgcctgcgccttagcgcgggcggtcggccgagcggcactgcgcctgcgcggagggcgctgggcggggagggacggggcttgcgccttggtgggacctccccaggggcggggctcggggggctccacgccaagggtgggctgcgcctacgcccttgactcagctttcccttttggggaattaggaatggaggatgccccgccctctcgggaggccacgcccaagggcgcgacgaaggaaggagccacatccccaacttgaggccacgcccccagcacctagggggcattttgagctgggatgggggaaacctcgtccctatggaggaggccacatcccggggctctggtaccgggaggcaccacctcatgtcccctggaaaagccataagatgggacccagacccctgggaccccagaccaattgccaagtatggaaatctcagctccctcgagggggggccctgggcaaggggtagggctctctggagcgcccctctaggtggcctggggactggagggaccaggatgctggttggagggccccggaataccggagtccctttagatatttgtgcaaaaaataaatggggggaggggggaggatgggatttcaaaagcacatgcgcccttgggcgcccaaaccctgggggccgaggggacggctctggttccccacgctgcccctacttccctttgggagtttgcctctccctctcccccaacaaacccagtcctcatatcatagagttcaacacacccatttgacagatggcaaaactgaggcttaaagagctgcttgagacttggccaaggttccaggtgccataccctctgtgcccctcccttaggcctgtgtgccccatggaagggtgggctgagatcgggatgacctgacacagctccctattgctgctaattccccctcggcctcctccaaggggtgggaattccaggccaagacccctacttcgcctttccttctccggctgccaagcaggacctttgccctcagccctttctcctgggatctccatgggggatgccatgagggcctcccaccacaaaagagaatttgggatcccctggtcccaggtttctccatcccttcttccttttccagaattttccaaataggaaagaacagaaggagaccagaaactctaggggggagaaagagaatgagagaaagagaatgagagagagagaaacacaaacacagtgacacagtgagagcttagtctccaagagcctattcattgattcaaacacccaagccacaggatacctcagatggccctcttgccagctggaagctctttctccaatgagcaaagttacagtgacctggctggagttacctggtgcacataggaccttaggggaaagttcagcgtggactacacttgctctgggatctgcttttccacatgtgtgtatggcacgcctttttctgctggattgggaaggacaagattttgctgtgctagggagaaatgaaaacggggtgagctgagtagctgggtttctggaggatagaacatcagatggggaggctttccgaggtgaagaatgagagggaaccacttactagagagaaaagagctccaggcctggggaacagcacgtgcgaaggccaggagagaagaactgttgaaacaacgagaagggtggcacggctggagctgagccagcaagggggatcgtgaggagccttggggttggggagatctgcagaagcatcagaccaggcagggcctcgtacgcagtcctgaggagttttacttttattctaagacagttggggagctccaggagctgttttaagttggggagagactggattccagcctgcaaaagctgttttgtgaagactaaaaccagtgaggagaggtggaggtgctttggggacactgaaatggattcttggaaagattctgaaggctgtgttgaaaagacacctatagctgtggggacatgactataatcccagcatttggggagaccgaggctggcagatcacttaaggtcaggagtttgagaccagcctggccaacatggcgaaaccccatctctgctaaaaatacaaaaattagctgggtgcagtggtgcatgcctgtagtcccagctactcaggagactgaggcgggagaattgtttgaaccctggaggcagaggttgtagtgagtcgtgatcacacaactgcactccagcctgggcaacagaacaatactccattccctcccctctaccccaccaaaaaaaaaaaaaaatcctgcccttagatgagctctagggctgctgagtacagttgtcccagttgcacagtgcccaagggtttggcattgctaagaaggccacgtgcaaatcctagatattgagtgttgtatgtttgtgacgttggtttcccgacatgtgaatggcccaagtgtctggaagaagtggcgccactttctaatttgcttggagatgttgcatgtcccttaaattcagacaggtgcaggtaactggaggttctgaaccaaaggttaaaatgcaaattctcatacagggttgggaagttgtagccagggataagcttatgtgactgttatatggactgaggagcagatgtgaatttcgaaccatgacatggctgagggtaggggtcgggtggatggatgattcagggttgtaacccatagagcccaaaggggaagtgatctgtgacctggggtgagggtgatctggaagatttttggatggctggaaagaaatggggaagtcgagctgcctgagagagccaagttatttcccaaaagattccttaggagtctttctgttcaagacctccgtgtgtgtgtgtgtgtgtttagggttccccagcaatggcccaggcatgtgaaggaaacaagcttcttcagggaatatttgttgaatgagttttcctgactcccaggctagaactgtttttgcaatttccaccctcttttctttcccccagagaactcctattcgtccttcaaaacccatcacggaaacccctcttggagaaaaccctccttccttcccctcaggactttcccagccaccgtctctcctccagtccagcctgatgccatgggactgggggtttctctgtccagctctgtttctcccagactggggtctgaggactctcaggacccccaactttacctagcacaggctgggcacaagtgggtgacagggagtctacgcctagtggaattatgtattggggcagggtcagtgtgagaatacacatccgcatgcatgtctgtccatgtctgtccgtaccaaccttccccttccacacggacctgggcacataggaggtgtctgagcctgacacatgggacagagagtggacatggctgagacacggacagagaaaagacaaggagtccagggggctgaaagccttttgaaatcaggaagttcctgtattggcagaacaaagcccagagaggagcagggctttcctcaacgccacccagcaagtggacacagagcccggccttggatgacacctccagggttctgaaccctggacctcgctttatgcaaggagctggccccacatttccatgaatcggggaaacagcacaagaaggttggcctgtggcagggcaagggttaaaggggtgacattgagggatgcctcagagtcaaagtcccctgaccaagaggaatagagtagaaaacacagagacagagggtgagatcacgccccgatgaggacggagagagacagagatggagagagacatagaggtggaaatatacagagaaagataaatgcagagaccaaggcagggagtgtcgggggaagtaaagagggtgtcctgaagaaagaaggatctgttcactcttaccagtctgtcctcgaatgatttgcataaaatgaggaggtgcctgtccacacccccaattcctctctcaggccccagagcctgagacctcaccatgcccccatcagagatgcaaaaaactaaacacccaactagaaatccttgggacctctctcggctgggatctcagagcctttctgtcccctacccctaccccatgtgctgtcgattttgcagatggggacaacctggggcctcccggaactctgccaccctggggaagttgggggagggccttagtcccggatcacaaccccgtctgctccccagaatcctttcctaagaatcgttgaggaccaaagttgtctttgctgacacgtgttgcttttctctttgccttttattgtttcagagaaaaatcaagttgactgtgtcaagtaacaccccaccccttacccccgtccagccatagtggctctctggagacacaggtcacaggcggagggtcccctgatcatccccaaccacacagccagggggacttgacccctgtccacccctgtctcgtgctccctcagacccccacaaaccggccaagcagtccggggaggcttcccctccacacaactcttagcatgtgattgcagatgtgaaatcaaaacgttgtttgttttttgttttgttttgattctaccccgtcggtccagtgtctgcacagacgccttcatttctctgtaaatatgtgacttggaacaaatgtttaacacaaacgagaagtggtcatgaatgcatggtgttgagatgttttgcactattctgactttttggtctctgtaaaaatattttattaacagcagacattaaaaaaagaaaaaccacacaca

SEQ ID NO: 9591 - RNA, 9953 nt, Homo sapiens
  source 1..9953: mol_type = mRNA
ctgaaccaagatggccggtggcggccgggccccggcgtgagccaagcgcgggctgcagccgggagatgccccagcccagcggccgctgagcccgacccgacagagccggcccggccgcctccggcccacctgcgagctcggagacatgtctctgctttgcgttggagagaaattcaacacgtacgtgaccctgaaagtgcagaatgtcaagagcacgaccatcgcggtgcggggcagccagcccagctgggagcaggatttcatgttcgagattaaccgtctggatttgggactgacggtggaggtgtggaataagggtctcatctgggacacaatggtgggcactgtgtggatcccactgaggaccatccgccagtccaatgaggagggccctggagagtggctgacgctggactcccaggtcatcatggcagacagtgagatctgtggcaccaaggaccccaccttccaccgcatcctcctggacacgcgctttgagctacccttagacattcctgaagaggaggctcgctactgggccaagaagctggagcagctcaatgctatgcgggaccaggatgaatattcgttccaagatgagcaagacaagcctctgcctgtccccagcaaccagtgctgcaactggaattattttggctggggtgagcagcacaacgatgaccccgacagtgcagtggatgatcgtgacagtgactaccgcagtgaaacgagcaacagcatcccgccgccctattatactacgtcacaacccaacgcctcagtccaccaatattctgttcgcccaccacccctgggctcccgggagtcctacagtgactccatgcacagttacgaggagttctctgagccacaagccctcagccccacgggtagcagccgctatgcctcttccggggagctgagccagggaagctctcagctgagcgaggacttcgaccctgacgagcacagcctgcagggctccgacatggaggatgagcgggaccgggactcctaccactcctgccacagctcggtcagctaccacaaagactcgcctcgctgggaccaggatgaggaagagctggaggaggacctggaggacttcctggaggaggaggagctgcctgaagatgaggaggagctggaggaggaggaggaggaggtgcctgacgatttgggcagctatgcccagcgtgaagacgtagctgtggctgagcccaaagacttcaaacgcatcagcctcccgccagctgccccagggaaggaggacaaggccccagtggcacccaccgaggcccccgacatggccaaggtggcccccaagccagccacgcccgacaaggtgcctgcagctgagcagatccctgaggctgagccacccaaggacgaggagagtttcaggccgagagaggatgaggaaggccaggaggggcaggactccatgtccagggccaaggccaactggctgcgtgccttcaacaaggtgcggatgcagctgcaggaggcccggggagaaggagagatgtctaaatccctatggttcaaaggcggcccagggggcggtctcatcatcatcgacagcatgccagacatccgcaagaggaaacctatcccactcgtgagcgacttggccatgtccctggtccagtccaggaaagcgggcatcacctcggccttggcctccagcacgttgaacaacgaggagctgaaaaaccacgtttacaagaagaccctgcaagccttaatctaccccatctcgtgcacgacgccacacaacttcgaagtgtggacggccaccacgcccacctactgctacgagtgcgaggggctgctgtggggcatcgcgaggcagggcatgcgctgcaccgagtgcggtgtcaagtgccacgagaagtgccaggacctgctcaacgccgactgcctgcagcgggctgcggagaagagctccaagcacggggcggaggaccggacacagaacatcatcatggtgctcaaggaccgcatgaagatccgggagcgcaacaagcccgagatcttcgagctcatccaggagatcttcgcggtgaccaagacggcgcacacgcagcagatgaaggcggtcaagcagagcgtgctggacggcacgtccaagtggtccgccaagatcagcatcaccgtggtctgcgcccagggcttgcaggcaaaggacaagacaggatccagtgacccctatgtcaccgtccaggtcgggaagaccaagaaacggacaaaaaccatctatgggaacctcaacccggtgtgggaggagaatttccactttgaatgtcacaattcctccgaccgcatcaaggtgcgcgtctgggacgaggatgacgacatcaaatcccgcgtgaaacagaggttcaagagggaatctgacgatttcctggggcagacgatcattgaggtgcggacgctcagcggcgagatggacgtgtggtacaacctggacaagcgaactgacaaatctgccgtgtcgggtgccatccggctccacatcagtgtggagatcaaaggcgaggagaaggtggccccgtaccatgtccagtacacctgtctgcatgagaacctgttccacttcgtgaccgacgtgcagaacaatggggtcgtgaagatcccagatgccaagggtgacgatgcctggaaggtttactacgatgagacagcccaggagattgtggacgagtttgccatgcgctacggcgtcgagtccatctaccaagccatgacccactttgcctgcctctcctccaagtatatgtgcccaggggtgcctgccgtcatgagcaccctgctcgccaacatcaatgcctactacgcacacaccaccgcctccaccaacgtgtctgcctccgaccgcttcgccgcctccaactttgggaaagagcgcttcgtgaaactcctggaccagctgcataactccctgcggattgacctctccatgtaccggaataacttcccagccagcagcccggagagactccaggacctcaaatccactgtggaccttctcaccagcatcaccttctttcggatgaaggtacaagaactccagagcccgccccgagccagccaggtggtaaaggactgtgtgaaagcctgccttaattctacctacgagtacatcttcaataactgccatgaactgtacagccgggagtaccagacagacccggccaagaagggggaagttctcccagaggaacaggggcccagcatcaagaacctcgacttctggtccaagctgattaccctcatagtgtccatcattgaggaagacaagaattcctacactccctgcctcaaccagtttccccaggagctgaatgtgggtaaaatcagcgctgaagtgatgtggaatctgtttgcccaagacatgaagtacgccatggaggagcacgacaagcatcgtctatgcaagagtgccgactacatgaacctccacttcaaggtgaaatggctctacaatgagtatgtgacggaacttcccgccttcaaggaccgcgtgcctgagtaccctgcatggtttgaacccttcgtcatccagtggctggatgagaatgaggaggtgtcccgggatttcctgcacggtgccctggagcgagacaagaaggatgggttccagcagacctcagagcatgccctattctcctgctccgtggtggatgttttctcccaactcaaccagagctttgaaatcatcaagaaactcgagtgtcccgaccctcagatcgtggggcactacatgaggcgctttgccaagaccatcagtaatgtgctcctccagtatgcagacatcatctccaaggactttgcctcctactgctccaaggagaaggagaaagtgccctgcattctcatgaataacactcaacagctacgagttcagctggagaagatgttcgaagccatgggaggaaaggagctggatgctgaagccagtgacatcctgaaggagcttcaggtgaaactcaataacgtcttggatgagctcagccgggtgtttgctaccagcttccagccgcacattgaagagtgtgtcaaacagatgggtgacatccttagccaggttaagggcacaggcaatgtgccagccagtgcctgcagcagcgtggcccaggacgcggacaatgtgttgcagcccatcatggacctgctggacagcaacctgaccctctttgccaaaatctgtgagaagactgtgctgaagcgagtgctgaaggagctgtggaagctggttatgaacaccatggagaaaaccatcgtcctgccgcccctcactgaccagacgatgatcgggaacctcttgagaaaacatggcaagggattagaaaagggcagggtgaaattgccaagccactcagacggaacccagatgatcttcaatgcagccaaggagctgggtcagctgtccaaactcaaggatcacatggtacgagaagaagccaagagcttgaccccaaagcagtgcgcggttgttgagttggccctggacaccatcaagcaatatttccacgcgggtggcgtgggcctcaagaagaccttcctggagaagagcccggacctgcaatccttgcgctatgccctgtcgctctacacgcaggccaccgacctgctaatcaagacctttgtacagacgcaatcggcccagggcttgggtgtagaagaccctgtgggtgaagtctctgtccatgttgagctgttcactcatccaggaactggggaacacaaggtcacagtgaaagtggtggctgccaatgacctcaagtggcagacttctggcatcttccggccgttcatcgaggtcaacatcattgggccccagctcagcgacaagaaacgcaagtttgcgaccaaatccaagaacaatagctgggctcccaagtacaatgagagcttccagttcacgctgagcgccgacgcgggtcccgagtgctatgagctgcaggtgtgcgtcaaggactactgcttcgcgcgcgaggaccgcacggtggggctggccgtgctgcagctgcgtgagctggcccagcgcgggagcgccgcctgctggctgccgctcggccgccgcatccacatggacgacacgggcctcacggtgctgcgaatcctctcgcagcgcagcaacgacgaggtggccaaggagttcgtgaagctcaagtcggacacgcgctccgccgaggagggcggtgccgcgcctgcgccttagcgcgggcggtcggccgagcggcactgcgcctgcgcggagggcgctgggcggggagggacggggcttgcgccttggtgggacctccccaggggcggggctcggggggctccacgccaagggtgggctgcgcctacgcccttgactcagctttcccttttggggaattaggaatggaggatgccccgccctctcgggaggccacgcccaagggcgcgacgaaggaaggagccacatccccaacttgaggccacgcccccagcacctagggggcattttgagctgggatgggggaaacctcgtccctatggaggaggccacatcccggggctctggtaccgggaggcaccacctcatgtcccctggaaaagccataagatgggacccagacccctgggaccccagaccaattgccaagtatggaaatctcagctccctcgagggggggccctgggcaaggggtagggctctctggagcgcccctctaggtggcctggggactggagggaccaggatgctggttggagggccccggaataccggagtccctttagatatttgtgcaaaaaataaatggggggaggggggaggatgggatttcaaaagcacatgcgcccttgggcgcccaaaccctgggggccgaggggacggctctggttccccacgctgcccctacttccctttgggagtttgcctctccctctcccccaacaaacccagtcctcatatcatagagttcaacacacccatttgacagatggcaaaactgaggcttaaagagctgcttgagacttggccaaggttccaggtgccataccctctgtgcccctcccttaggcctgtgtgccccatggaagggtgggctgagatcgggatgacctgacacagctccctattgctgctaattccccctcggcctcctccaaggggtgggaattccaggccaagacccctacttcgcctttccttctccggctgccaagcaggacctttgccctcagccctttctcctgggatctccatgggggatgccatgagggcctcccaccacaaaagagaatttgggatcccctggtcccaggtttctccatcccttcttccttttccagaattttccaaataggaaagaacagaaggagaccagaaactctaggggggagaaagagaatgagagaaagagaatgagagagagagaaacacaaacacagtgacacagtgagagcttagtctccaagagcctattcattgattcaaacacccaagccacaggatacctcagatggccctcttgccagctggaagctctttctccaatgagcaaagttacagtgacctggctggagttacctggtgcacataggaccttaggggaaagttcagcgtggactacacttgctctgggatctgcttttccacatgtgtgtatggcacgcctttttctgctggattgggaaggacaagattttgctgtgctagggagaaatgaaaacggggtgagctgagtagctgggtttctggaggatagaacatcagatggggaggctttccgaggtgaagaatgagagggaaccacttactagagagaaaagagctccaggcctggggaacagcacgtgcgaaggccaggagagaagaactgttgaaacaacgagaagggtggcacggctggagctgagccagcaagggggatcgtgaggagccttggggttggggagatctgcagaagcatcagaccaggcagggcctcgtacgcagtcctgaggagttttacttttattctaagacagttggggagctccaggagctgttttaagttggggagagactggattccagcctgcaaaagctgttttgtgaagactaaaaccagtgaggagaggtggaggtgctttggggacactgaaatggattcttggaaagattctgaaggctgtgttgaaaagacacctatagctgtggggacatgactataatcccagcatttggggagaccgaggctggcagatcacttaaggtcaggagtttgagaccagcctggccaacatggcgaaaccccatctctgctaaaaatacaaaaattagctgggtgcagtggtgcatgcctgtagtcccagctactcaggagactgaggcgggagaattgtttgaaccctggaggcagaggttgtagtgagtcgtgatcacacaactgcactccagcctgggcaacagaacaatactccattccctcccctctaccccaccaaaaaaaaaaaaaaatcctgcccttagatgagctctagggctgctgagtacagttgtcccagttgcacagtgcccaagggtttggcattgctaagaaggccacgtgcaaatcctagatattgagtgttgtatgtttgtgacgttggtttcccgacatgtgaatggcccaagtgtctggaagaagtggcgccactttctaatttgcttggagatgttgcatgtcccttaaattcagacaggtgcaggtaactggaggttctgaaccaaaggttaaaatgcaaattctcatacagggttgggaagttgtagccagggataagcttatgtgactgttatatggactgaggagcagatgtgaatttcgaaccatgacatggctgagggtaggggtcgggtggatggatgattcagggttgtaacccatagagcccaaaggggaagtgatctgtgacctggggtgagggtgatctggaagatttttggatggctggaaagaaatggggaagtcgagctgcctgagagagccaagttatttcccaaaagattccttaggagtctttctgttcaagacctccgtgtgtgtgtgtgtgtgtttagggttccccagcaatggcccaggcatgtgaaggaaacaagcttcttcagggaatatttgttgaatgagttttcctgactcccaggctagaactgtttttgcaatttccaccctcttttctttcccccagagaactcctattcgtccttcaaaacccatcacggaaacccctcttggagaaaaccctccttccttcccctcaggactttcccagccaccgtctctcctccagtccagcctgatgccatgggactgggggtttctctgtccagctctgtttctcccagactggggtctgaggactctcaggacccccaactttacctagcacaggctgggcacaagtgggtgacagggagtctacgcctagtggaattatgtattggggcagggtcagtgtgagaatacacatccgcatgcatgtctgtccatgtctgtccgtaccaaccttccccttccacacggacctgggcacataggaggtgtctgagcctgacacatgggacagagagtggacatggctgagacacggacagagaaaagacaaggagtccagggggctgaaagccttttgaaatcaggaagttcctgtattggcagaacaaagcccagagaggagcagggctttcctcaacgccacccagcaagtggacacagagcccggccttggatgacacctccagggttctgaaccctggacctcgctttatgcaaggagctggccccacatttccatgaatcggggaaacagcacaagaaggttggcctgtggcagggcaagggttaaaggggtgacattgagggatgcctcagagtcaaagtcccctgaccaagaggaatagagtagaaaacacagagacagagggtgagatcacgccccgatgaggacggagagagacagagatggagagagacatagaggtggaaatatacagagaaagataaatgcagagaccaaggcagggagtgtcgggggaagtaaagagggtgtcctgaagaaagaaggatctgttcactcttaccagtctgtcctcgaatgatttgcataaaatgaggaggtgcctgtccacacccccaattcctctctcaggccccagagcctgagacctcaccatgcccccatcagagatgcaaaaaactaaacacccaactagaaatccttgggacctctctcggctgggatctcagagcctttctgtcccctacccctaccccatgtgctgtcgattttgcagatggggacaacctggggcctcccggaactctgccaccctggggaagttgggggagggccttagtcccggatcacaaccccgtctgctccccagaatcctttcctaagaatcgttgaggaccaaagttgtctttgctgacacgtgttgcttttctctttgccttttattgtttcagagaaaaatcaagttgactgtgtcaagtaacaccccaccccttacccccgtccagccatagtggctctctggagacacaggtcacaggcggagggtcccctgatcatccccaaccacacagccagggggacttgacccctgtccacccctgtctcgtgctccctcagacccccacaaaccggccaagcagtccggggaggcttcccctccacacaactcttagcatgtgattgcagatgtgaaatcaaaacgttgtttgttttttgttttgttttgattctaccccgtcggtccagtgtctgcacagacgccttcatttctctgtaaatatgtgacttggaacaaatgtttaacacaaacgagaagtggtcatgaatgcatggtgttgagatgttttgcactattctgactttttggtctctgtaaaaatattttattaacagcagacattaaaaaaagaaaaaccacacacagccttgga

SEQ ID NO: 9592 - RNA, 9980 nt, Homo sapiens
  source 1..9980: mol_type = mRNA
ctgaaccaagatggccggtggcggccgggccccggcgtgagccaagcgcgggctgcagccgggagatgccccagcccagcggccgctgagcccgacccgacagagccggcccggccgcctccggcccacctgcgagctcggagacatgtctctgctttgcgttggagtcaaaaaagccaagtttgatggtgcccaagagaaattcaacacgtacgtgaccctgaaagtgcagaatgtcaagagcacgaccatcgcggtgcggggcagccagcccagctgggagcaggatttcatgttcgagattaaccgtctggatttgggactgacggtggaggtgtggaataagggtctcatctgggacacaatggtgggcactgtgtggatcccactgaggaccatccgccagtccaatgaggagggccctggagagtggctgacgctggactcccaggtcatcatggcagacagtgagatctgtggcaccaaggaccccaccttccaccgcatcctcctggacacgcgctttgagctacccttagacattcctgaagaggaggctcgctactgggccaagaagctggagcagctcaatgctatgcgggaccaggatgaatattcgttccaagatgagcaagacaagcctctgcctgtccccagcaaccagtgctgcaactggaattattttggctggggtgagcagcacaacgatgaccccgacagtgcagtggatgatcgtgacagtgactaccgcagtgaaacgagcaacagcatcccgccgccctattatactacgtcacaacccaacgcctcagtccaccaatattctgttcgcccaccacccctgggctcccgggagtcctacagtgactccatgcacagttacgaggagttctctgagccacaagccctcagccccacgggtagcagccgctatgcctcttccggggagctgagccagggaagctctcagctgagcgaggacttcgaccctgacgagcacagcctgcagggctccgacatggaggatgagcgggaccgggactcctaccactcctgccacagctcggtcagctaccacaaagactcgcctcgctgggaccaggatgaggaagagctggaggaggacctggaggacttcctggaggaggaggagctgcctgaagatgaggaggagctggaggaggaggaggaggaggtgcctgacgatttgggcagctatgcccagcgtgaagacgtagctgtggctgagcccaaagacttcaaacgcatcagcctcccgccagctgccccagggaaggaggacaaggccccagtggcacccaccgaggcccccgacatggccaaggtggcccccaagccagccacgcccgacaaggtgcctgcagctgagcagatccctgaggctgagccacccaaggacgaggagagtttcaggccgagagaggatgaggaaggccaggaggggcaggactccatgtccagggccaaggccaactggctgcgtgccttcaacaaggtgcggatgcagctgcaggaggcccggggagaaggagagatgtctaaatccctatggttcaaaggcggcccagggggcggtctcatcatcatcgacagcatgccagacatccgcaagaggaaacctatcccactcgtgagcgacttggccatgtccctggtccagtccaggaaagcgggcatcacctcggccttggcctccagcacgttgaacaacgaggagctgaaaaaccacgtttacaagaagaccctgcaagccttaatctaccccatctcgtgcacgacgccacacaacttcgaagtgtggacggccaccacgcccacctactgctacgagtgcgaggggctgctgtggggcatcgcgaggcagggcatgcgctgcaccgagtgcggtgtcaagtgccacgagaagtgccaggacctgctcaacgccgactgcctgcagcgggctgcggagaagagctccaagcacggggcggaggaccggacacagaacatcatcatggtgctcaaggaccgcatgaagatccgggagcgcaacaagcccgagatcttcgagctcatccaggagatcttcgcggtgaccaagacggcgcacacgcagcagatgaaggcggtcaagcagagcgtgctggacggcacgtccaagtggtccgccaagatcagcatcaccgtggtctgcgcccagggcttgcaggcaaaggacaagacaggatccagtgacccctatgtcaccgtccaggtcgggaagaccaagaaacggacaaaaaccatctatgggaacctcaacccggtgtgggaggagaatttccactttgaatgtcacaattcctccgaccgcatcaaggtgcgcgtctgggacgaggatgacgacatcaaatcccgcgtgaaacagaggttcaagagggaatctgacgatttcctggggcagacgatcattgaggtgcggacgctcagcggcgagatggacgtgtggtacaacctggacaagcgaactgacaaatctgccgtgtcgggtgccatccggctccacatcagtgtggagatcaaaggcgaggagaaggtggccccgtaccatgtccagtacacctgtctgcatgagaacctgttccacttcgtgaccgacgtgcagaacaatggggtcgtgaagatcccagatgccaagggtgacgatgcctggaaggtttactacgatgagacagcccaggagattgtggacgagtttgccatgcgctacggcgtcgagtccatctaccaagccatgacccactttgcctgcctctcctccaagtatatgtgcccaggggtgcctgccgtcatgagcaccctgctcgccaacatcaatgcctactacgcacacaccaccgcctccaccaacgtgtctgcctccgaccgcttcgccgcctccaactttgggaaagagcgcttcgtgaaactcctggaccagctgcataactccctgcggattgacctctccatgtaccggaataacttcccagccagcagcccggagagactccaggacctcaaatccactgtggaccttctcaccagcatcaccttctttcggatgaaggtacaagaactccagagcccgccccgagccagccaggtggtaaaggactgtgtgaaagcctgccttaattctacctacgagtacatcttcaataactgccatgaactgtacagccgggagtaccagacagacccggccaagaagggggaagttctcccagaggaacaggggcccagcatcaagaacctcgacttctggtccaagctgattaccctcatagtgtccatcattgaggaagacaagaattcctacactccctgcctcaaccagtttccccaggagctgaatgtgggtaaaatcagcgctgaagtgatgtggaatctgtttgcccaagacatgaagtacgccatggaggagcacgacaagcatcgtctatgcaagagtgccgactacatgaacctccacttcaaggtgaaatggctctacaatgagtatgtgacggaacttcccgccttcaaggaccgcgtgcctgagtaccctgcatggtttgaacccttcgtcatccagtggctggatgagaatgaggaggtgtcccgggatttcctgcacggtgccctggagcgagacaagaaggatgggttccagcagacctcagagcatgccctattctcctgctccgtggtggatgttttctcccaactcaaccagagctttgaaatcatcaagaaactcgagtgtcccgaccctcagatcgtggggcactacatgaggcgctttgccaagaccatcagtaatgtgctcctccagtatgcagacatcatctccaaggactttgcctcctactgctccaaggagaaggagaaaccctgcattctcatgaataacactcaacagctacgagttcagctggagaagatgttcgaagccatgggaggaaaggagctggatgctgaagccagtgacatcctgaaggagcttcaggtgaaactcaataacgtcttggatgagctcagccgggtgtttgctaccagcttccagccgcacattgaagagtgtgtcaaacagatgggtgacatccttagccaggttaagggcacaggcaatgtgccagccagtgcctgcagcagcgtggcccaggacgcggacaatgtgttgcagcccatcatggacctgctggacagcaacctgaccctctttgccaaaatctgtgagaagactgtgctgaagcgagtgctgaaggagctgtggaagctggttatgaacaccatggagaaaaccatcgtcctgccgcccctcactgaccagacgatgatcgggaacctcttgagaaaacatggcaagggattagaaaagggcagggtgaaattgccaagccactcagacggaacccagatgatcttcaatgcagccaaggagctgggtcagctgtccaaactcaaggatcacatggtacgagaagaagccaagagcttgaccccaaagcagtgcgcggttgttgagttggccctggacaccatcaagcaatatttccacgcgggtggcgtgggcctcaagaagaccttcctggagaagagcccggacctgcaatccttgcgctatgccctgtcgctctacacgcaggccaccgacctgctaatcaagacctttgtacagacgcaatcggcccagggcttgggtgtagaagaccctgtgggtgaagtctctgtccatgttgagctgttcactcatccaggaactggggaacacaaggtcacagtgaaagtggtggctgccaatgacctcaagtggcagacttctggcatcttccggccgttcatcgaggtcaacatcattgggccccagctcagcgacaagaaacgcaagtttgcgaccaaatccaagaacaatagctgggctcccaagtacaatgagagcttccagttcacgctgagcgccgacgcgggtcccgagtgctatgagctgcaggtgtgcgtcaaggactactgcttcgcgcgcgaggaccgcacggtggggctggccgtgctgcagctgcgtgagctggcccagcgcgggagcgccgcctgctggctgccgctcggccgccgcatccacatggacgacacgggcctcacggtgctgcgaatcctctcgcagcgcagcaacgacgaggtggccaaggagttcgtgaagctcaagtcggacacgcgctccgccgaggagggcggtgccgcgcctgcgccttagcgcgggcggtcggccgagcggcactgcgcctgcgcggagggcgctgggcggggagggacggggcttgcgccttggtgggacctccccaggggcggggctcggggggctccacgccaagggtgggctgcgcctacgcccttgactcagctttcccttttggggaattaggaatggaggatgccccgccctctcgggaggccacgcccaagggcgcgacgaaggaaggagccacatccccaacttgaggccacgcccccagcacctagggggcattttgagctgggatgggggaaacctcgtccctatggaggaggccacatcccggggctctggtaccgggaggcaccacctcatgtcccctggaaaagccataagatgggacccagacccctgggaccccagaccaattgccaagtatggaaatctcagctccctcgagggggggccctgggcaaggggtagggctctctggagcgcccctctaggtggcctggggactggagggaccaggatgctggttggagggccccggaataccggagtccctttagatatttgtgcaaaaaataaatggggggaggggggaggatgggatttcaaaagcacatgcgcccttgggcgcccaaaccctgggggccgaggggacggctctggttccccacgctgcccctacttccctttgggagtttgcctctccctctcccccaacaaacccagtcctcatatcatagagttcaacacacccatttgacagatggcaaaactgaggcttaaagagctgcttgagacttggccaaggttccaggtgccataccctctgtgcccctcccttaggcctgtgtgccccatggaagggtgggctgagatcgggatgacctgacacagctccctattgctgctaattccccctcggcctcctccaaggggtgggaattccaggccaagacccctacttcgcctttccttctccggctgccaagcaggacctttgccctcagccctttctcctgggatctccatgggggatgccatgagggcctcccaccacaaaagagaatttgggatcccctggtcccaggtttctccatcccttcttccttttccagaattttccaaataggaaagaacagaaggagaccagaaactctaggggggagaaagagaatgagagaaagagaatgagagagagagaaacacaaacacagtgacacagtgagagcttagtctccaagagcctattcattgattcaaacacccaagccacaggatacctcagatggccctcttgccagctggaagctctttctccaatgagcaaagttacagtgacctggctggagttacctggtgcacataggaccttaggggaaagttcagcgtggactacacttgctctgggatctgcttttccacatgtgtgtatggcacgcctttttctgctggattgggaaggacaagattttgctgtgctagggagaaatgaaaacggggtgagctgagtagctgggtttctggaggatagaacatcagatggggaggctttccgaggtgaagaatgagagggaaccacttactagagagaaaagagctccaggcctggggaacagcacgtgcgaaggccaggagagaagaactgttgaaacaacgagaagggtggcacggctggagctgagccagcaagggggatcgtgaggagccttggggttggggagatctgcagaagcatcagaccaggcagggcctcgtacgcagtcctgaggagttttacttttattctaagacagttggggagctccaggagctgttttaagttggggagagactggattccagcctgcaaaagctgttttgtgaagactaaaaccagtgaggagaggtggaggtgctttggggacactgaaatggattcttggaaagattctgaaggctgtgttgaaaagacacctatagctgtggggacatgactataatcccagcatttggggagaccgaggctggcagatcacttaaggtcaggagtttgagaccagcctggccaacatggcgaaaccccatctctgctaaaaatacaaaaattagctgggtgcagtggtgcatgcctgtagtcccagctactcaggagactgaggcgggagaattgtttgaaccctggaggcagaggttgtagtgagtcgtgatcacacaactgcactccagcctgggcaacagaacaatactccattccctcccctctaccccaccaaaaaaaaaaaaaaatcctgcccttagatgagctctagggctgctgagtacagttgtcccagttgcacagtgcccaagggtttggcattgctaagaaggccacgtgcaaatcctagatattgagtgttgtatgtttgtgacgttggtttcccgacatgtgaatggcccaagtgtctggaagaagtggcgccactttctaatttgcttggagatgttgcatgtcccttaaattcagacaggtgcaggtaactggaggttctgaaccaaaggttaaaatgcaaattctcatacagggttgggaagttgtagccagggataagcttatgtgactgttatatggactgaggagcagatgtgaatttcgaaccatgacatggctgagggtaggggtcgggtggatggatgattcagggttgtaacccatagagcccaaaggggaagtgatctgtgacctggggtgagggtgatctggaagatttttggatggctggaaagaaatggggaagtcgagctgcctgagagagccaagttatttcccaaaagattccttaggagtctttctgttcaagacctccgtgtgtgtgtgtgtgtgtttagggttccccagcaatggcccaggcatgtgaaggaaacaagcttcttcagggaatatttgttgaatgagttttcctgactcccaggctagaactgtttttgcaatttccaccctcttttctttcccccagagaactcctattcgtccttcaaaacccatcacggaaacccctcttggagaaaaccctccttccttcccctcaggactttcccagccaccgtctctcctccagtccagcctgatgccatgggactgggggtttctctgtccagctctgtttctcccagactggggtctgaggactctcaggacccccaactttacctagcacaggctgggcacaagtgggtgacagggagtctacgcctagtggaattatgtattggggcagggtcagtgtgagaatacacatccgcatgcatgtctgtccatgtctgtccgtaccaaccttccccttccacacggacctgggcacataggaggtgtctgagcctgacacatgggacagagagtggacatggctgagacacggacagagaaaagacaaggagtccagggggctgaaagccttttgaaatcaggaagttcctgtattggcagaacaaagcccagagaggagcagggctttcctcaacgccacccagcaagtggacacagagcccggccttggatgacacctccagggttctgaaccctggacctcgctttatgcaaggagctggccccacatttccatgaatcggggaaacagcacaagaaggttggcctgtggcagggcaagggttaaaggggtgacattgagggatgcctcagagtcaaagtcccctgaccaagaggaatagagtagaaaacacagagacagagggtgagatcacgccccgatgaggacggagagagacagagatggagagagacatagaggtggaaatatacagagaaagataaatgcagagaccaaggcagggagtgtcgggggaagtaaagagggtgtcctgaagaaagaaggatctgttcactcttaccagtctgtcctcgaatgatttgcataaaatgaggaggtgcctgtccacacccccaattcctctctcaggccccagagcctgagacctcaccatgcccccatcagagatgcaaaaaactaaacacccaactagaaatccttgggacctctctcggctgggatctcagagcctttctgtcccctacccctaccccatgtgctgtcgattttgcagatggggacaacctggggcctcccggaactctgccaccctggggaagttgggggagggccttagtcccggatcacaaccccgtctgctccccagaatcctttcctaagaatcgttgaggaccaaagttgtctttgctgacacgtgttgcttttctctttgccttttattgtttcagagaaaaatcaagttgactgtgtcaagtaacaccccaccccttacccccgtccagccatagtggctctctggagacacaggtcacaggcggagggtcccctgatcatccccaaccacacagccagggggacttgacccctgtccacccctgtctcgtgctccctcagacccccacaaaccggccaagcagtccggggaggcttcccctccacacaactcttagcatgtgattgcagatgtgaaatcaaaacgttgtttgttttttgttttgttttgattctaccccgtcggtccagtgtctgcacagacgccttcatttctctgtaaatatgtgacttggaacaaatgtttaacacaaacgagaagtggtcatgaatgcatggtgttgagatgttttgcactattctgactttttggtctctgtaaaaatattttattaacagcagacattaaaaaaagaaaaaccacacacagccttgga

SEQ ID NO: 9593 - RNA, 9914 nt, Homo sapiens
  source 1..9914: mol_type = mRNA
ctgaaccaagatggccggtggcggccgggccccggcgtgagccaagcgcgggctgcagccgggagatgccccagcccagcggccgctgagcccgacccgacagagccggcccggccgcctccggcccacctgcgagctcggagacatgtctctgctttgcgttggagtcaaaaaagccaagtttgatggtgcccaagagaaattcaacacgtacgtgaccctgaaagtgcagaatgtcaagagcacgaccatcgcggtgcggggcagccagcccagctgggagcaggatttcatgttcgagattaaccgtctggatttgggactgacggtggaggtgtggaataagggtctcatctgggacacaatggtgggcactgtgtggatcccactgaggaccatccgccagtccaatgaggagggccctggagagtggctgacgctggactcccaggtcatcatggcagacagtgagatctgtggcaccaaggaccccaccttccaccgcatcctcctggacacgcgctttgagctacccttagacattcctgaagaggaggctcgctactgggccaagaagctggagcagctcaatgctatgcgggaccaggatgaatattcgttccaagatgagcaagacaagcctctgcctgtccccagcaaccagtgctgcaactggaattattttggctggggtgagcagcacaacgatgaccccgacagtgcagtggatgatcgtgacagtgactaccgcagtgaaacgagcaacagcatcccgccgccctattatactacgtcacaacccaacgcctcagtccaccaatattctgttcgcccaccacccctgggctcccgggagtcctacagtgactccatgcacagttacgaggagttctctgagccacaagccctcagccccacgggtagcagccgctatgcctcttccggggagctgagccagggaagctctcagctgagcgaggacttcgaccctgacgagcacagcctgcagggctccgacatggaggatgagcgggaccgggactcctaccactcctgccacagctcggtcagctaccacaaagactcgcctcgctgggaccaggatgaggaagagctggaggaggacctggaggacttcctggaggaggaggagctgcctgaagatgaggaggagctggaggaggaggaggaggaggtgcctgacgatttgggcagctatgcccagcgtgaagacgtagctgtggctgagcccaaagacttcaaacgcatcagcctcccgccagctgccccagggaaggaggacaaggccccagtggcacccaccgaggcccccgacatggccaaggtggcccccaagccagccacgcccgacaaggtgcctgcagctgagcagatccctgaggctgagccacccaaggacgaggagagtttcaggccgagagaggatgaggaaggccaggaggggcaggactccatgtccagggccaaggccaactggctgcgtgccttcaacaaggtgcggatgcagctgcaggaggcccggggagaaggagagatgtctaaatccctatggttcaaaggcggcccagggggcggtctcatcatcatcgacagcatgccagacatccgcaagaggaaacctatcccactcgtgagcgacttggccatgtccctggtccagtccaggaaagcgggcatcacctcggccttggcctccagcacgttgaacaacgaggagctgaaaaaccacgtttacaagaagaccctgcaagccttaatctaccccatctcgtgcacgacgccacacaacttcgaagtgtggacggccaccacgcccacctactgctacgagtgcgaggggctgctgtggggcatcgcgaggcagggcatgcgctgcaccgagtgcggtgtcaagtgccacgagaagtgccaggacctgctcaacgccgactgcctgcagcgggctgcggagaagagctccaagcacggggcggaggaccggacacagaacatcatcatggtgctcaaggaccgcatgaagatccgggagcgcaacaagcccgagatcttcgagctcatccaggagatcttcgcggtgaccaagacggcgcacacgcagcagatgaaggcggtcaagcagagcgtgctggacggcacgtccaagtggtccgccaagatcagcatcaccgtggtctgcgcccagggcttgcaggcaaaggacaagacaggatccagtgacccctatgtcaccgtccaggtcgggaagaccaagaaacggacaaaaaccatctatgggaacctcaacccggtgtgggaggagaatttccactttgaatgtcacaattcctccgaccgcatcaaggtgcgcgtctgggacgaggatgacgacatcaaatcccgcgtgaaacagaggttcaagagggaatctgacgatttcctggggcagacgatcattgaggtgcggacgctcagcggcgagatggacgtgtggtacaacctggacaagcgaactgacaaatctgccgtgtcgggtgccatccggctccacatcagtgtggagatcaaaggcgaggagaaggtggccccgtaccatgtccagtacacctgtctgcatgagaacctgttccacttcgtgaccgacgtgcagaacaatggggtcgtgaagatcccagatgccaagggtgacgatgcctggaaggtttactacgatgagacagcccaggagattgtggacgagtttgccatgcgctacggcgtcgagtccatctaccaagccatgacccactttgcctgcctctcctccaagtatatgtgcccaggggtgcctgccgtcatgagcaccctgctcgccaacatcaatgcctactacgcacacaccaccgcctccaccaacgtgtctgcctccgaccgcttcgccgcctccaactttgggaaagagcgcttcgtgaaactcctggaccagctgcataactccctgcggattgacctctccatgtaccggaataacttcccagccagcagcccggagagactccaggacctcaaatccactgtggaccttctcaccagcatcaccttctttcggatgaaggtacaagaactccagagcccgccccgagccagccaggtggtaaaggactgtgtgaaagcctgccttaattctacctacgagtacatcttcaataactgccatgaactgtacagccgggagtaccagacagacccggccaagaagggggaagttctcccagaggaacaggggcccagcatcaagaacctcgacttctggtccaagctgattaccctcatagtgtccatcattgaggaagacaagaattcctacactccctgcctcaaccagtttccccaggagctgaatgtgggtaaaatcagcgctgaagtgatgtggaatctgtttgcccaagacatgaagtacgccatggaggagcacgacaagcatcgtctatgcaagagtgccgactacatgaacctccacttcaaggtgaaatggctctacaatgagtatgtgacggaacttcccgccttcaaggaccgcgtgcctgagtaccctgcatggtttgaacccttcgtcatccagtggctggatgagaatgaggaggtgtcccgggatttcctgcacggtgccctggagcgagacaagaaggatgggttccagcagacctcagagcatgccctattctcctgctccgtggtggatgttttctcccaactcaaccagagctttgaaatcatcaagaaactcgagtgtcccgaccctcagatcgtggggcactacatgaggcgctttgccaagaccatcagtaatgtgctcctccagtatgcagacatcatctccaaggactttgcctcctactgctccaaggagaaggagaaagtgccctgcattctcatgaataacactcaacagctacgagttcagctggagaagatgttcgaagccatgggaggaaaggagctggatgctgaagccagtgacatcctgaaggagcttcaggtgaaactcaataacgtcttggatgagctcagccgggtgtttgctaccagcttccagccgcacattgaagagtgtgtcaaacagatgggtgacatccttagccaggttaagggcacaggcaatgtgccagccagtgcctgcagcagcgtggcccaggacgcggacaatgtgttgcagcccatcatggacctgctggacagcaacctgaccctctttgccaaaatctgtgagaagactgtgctgaagcgagtgctgaaggagctgtggaagctggttatgaacaccatggagaaaaccatcgtcctgccgcccctcactgaccagacgatgatcggaacccagatgatcttcaatgcagccaaggagctgggtcagctgtccaaactcaaggatcacatggtacgagaagaagccaagagcttgaccccaaagcagtgcgcggttgttgagttggccctggacaccatcaagcaatatttccacgcgggtggcgtgggcctcaagaagaccttcctggagaagagcccggacctgcaatccttgcgctatgccctgtcgctctacacgcaggccaccgacctgctaatcaagacctttgtacagacgcaatcggcccagggcttgggtgtagaagaccctgtgggtgaagtctctgtccatgttgagctgttcactcatccaggaactggggaacacaaggtcacagtgaaagtggtggctgccaatgacctcaagtggcagacttctggcatcttccggccgttcatcgaggtcaacatcattgggccccagctcagcgacaagaaacgcaagtttgcgaccaaatccaagaacaatagctgggctcccaagtacaatgagagcttccagttcacgctgagcgccgacgcgggtcccgagtgctatgagctgcaggtgtgcgtcaaggactactgcttcgcgcgcgaggaccgcacggtggggctggccgtgctgcagctgcgtgagctggcccagcgcgggagcgccgcctgctggctgccgctcggccgccgcatccacatggacgacacgggcctcacggtgctgcgaatcctctcgcagcgcagcaacgacgaggtggccaaggagttcgtgaagctcaagtcggacacgcgctccgccgaggagggcggtgccgcgcctgcgccttagcgcgggcggtcggccgagcggcactgcgcctgcgcggagggcgctgggcggggagggacggggcttgcgccttggtgggacctccccaggggcggggctcggggggctccacgccaagggtgggctgcgcctacgcccttgactcagctttcccttttggggaattaggaatggaggatgccccgccctctcgggaggccacgcccaagggcgcgacgaaggaaggagccacatccccaacttgaggccacgcccccagcacctagggggcattttgagctgggatgggggaaacctcgtccctatggaggaggccacatcccggggctctggtaccgggaggcaccacctcatgtcccctggaaaagccataagatgggacccagacccctgggaccccagaccaattgccaagtatggaaatctcagctccctcgagggggggccctgggcaaggggtagggctctctggagcgcccctctaggtggcctggggactggagggaccaggatgctggttggagggccccggaataccggagtccctttagatatttgtgcaaaaaataaatggggggaggggggaggatgggatttcaaaagcacatgcgcccttgggcgcccaaaccctgggggccgaggggacggctctggttccccacgctgcccctacttccctttgggagtttgcctctccctctcccccaacaaacccagtcctcatatcatagagttcaacacacccatttgacagatggcaaaactgaggcttaaagagctgcttgagacttggccaaggttccaggtgccataccctctgtgcccctcccttaggcctgtgtgccccatggaagggtgggctgagatcgggatgacctgacacagctccctattgctgctaattccccctcggcctcctccaaggggtgggaattccaggccaagacccctacttcgcctttccttctccggctgccaagcaggacctttgccctcagccctttctcctgggatctccatgggggatgccatgagggcctcccaccacaaaagagaatttgggatcccctggtcccaggtttctccatcccttcttccttttccagaattttccaaataggaaagaacagaaggagaccagaaactctaggggggagaaagagaatgagagaaagagaatgagagagagagaaacacaaacacagtgacacagtgagagcttagtctccaagagcctattcattgattcaaacacccaagccacaggatacctcagatggccctcttgccagctggaagctctttctccaatgagcaaagttacagtgacctggctggagttacctggtgcacataggaccttaggggaaagttcagcgtggactacacttgctctgggatctgcttttccacatgtgtgtatggcacgcctttttctgctggattgggaaggacaagattttgctgtgctagggagaaatgaaaacggggtgagctgagtagctgggtttctggaggatagaacatcagatggggaggctttccgaggtgaagaatgagagggaaccacttactagagagaaaagagctccaggcctggggaacagcacgtgcgaaggccaggagagaagaactgttgaaacaacgagaagggtggcacggctggagctgagccagcaagggggatcgtgaggagccttggggttggggagatctgcagaagcatcagaccaggcagggcctcgtacgcagtcctgaggagttttacttttattctaagacagttggggagctccaggagctgttttaagttggggagagactggattccagcctgcaaaagctgttttgtgaagactaaaaccagtgaggagaggtggaggtgctttggggacactgaaatggattcttggaaagattctgaaggctgtgttgaaaagacacctatagctgtggggacatgactataatcccagcatttggggagaccgaggctggcagatcacttaaggtcaggagtttgagaccagcctggccaacatggcgaaaccccatctctgctaaaaatacaaaaattagctgggtgcagtggtgcatgcctgtagtcccagctactcaggagactgaggcgggagaattgtttgaaccctggaggcagaggttgtagtgagtcgtgatcacacaactgcactccagcctgggcaacagaacaatactccattccctcccctctaccccaccaaaaaaaaaaaaaaatcctgcccttagatgagctctagggctgctgagtacagttgtcccagttgcacagtgcccaagggtttggcattgctaagaaggccacgtgcaaatcctagatattgagtgttgtatgtttgtgacgttggtttcccgacatgtgaatggcccaagtgtctggaagaagtggcgccactttctaatttgcttggagatgttgcatgtcccttaaattcagacaggtgcaggtaactggaggttctgaaccaaaggttaaaatgcaaattctcatacagggttgggaagttgtagccagggataagcttatgtgactgttatatggactgaggagcagatgtgaatttcgaaccatgacatggctgagggtaggggtcgggtggatggatgattcagggttgtaacccatagagcccaaaggggaagtgatctgtgacctggggtgagggtgatctggaagatttttggatggctggaaagaaatggggaagtcgagctgcctgagagagccaagttatttcccaaaagattccttaggagtctttctgttcaagacctccgtgtgtgtgtgtgtgtgtttagggttccccagcaatggcccaggcatgtgaaggaaacaagcttcttcagggaatatttgttgaatgagttttcctgactcccaggctagaactgtttttgcaatttccaccctcttttctttcccccagagaactcctattcgtccttcaaaacccatcacggaaacccctcttggagaaaaccctccttccttcccctcaggactttcccagccaccgtctctcctccagtccagcctgatgccatgggactgggggtttctctgtccagctctgtttctcccagactggggtctgaggactctcaggacccccaactttacctagcacaggctgggcacaagtgggtgacagggagtctacgcctagtggaattatgtattggggcagggtcagtgtgagaatacacatccgcatgcatgtctgtccatgtctgtccgtaccaaccttccccttccacacggacctgggcacataggaggtgtctgagcctgacacatgggacagagagtggacatggctgagacacggacagagaaaagacaaggagtccagggggctgaaagccttttgaaatcaggaagttcctgtattggcagaacaaagcccagagaggagcagggctttcctcaacgccacccagcaagtggacacagagcccggccttggatgacacctccagggttctgaaccctggacctcgctttatgcaaggagctggccccacatttccatgaatcggggaaacagcacaagaaggttggcctgtggcagggcaagggttaaaggggtgacattgagggatgcctcagagtcaaagtcccctgaccaagaggaatagagtagaaaacacagagacagagggtgagatcacgccccgatgaggacggagagagacagagatggagagagacatagaggtggaaatatacagagaaagataaatgcagagaccaaggcagggagtgtcgggggaagtaaagagggtgtcctgaagaaagaaggatctgttcactcttaccagtctgtcctcgaatgatttgcataaaatgaggaggtgcctgtccacacccccaattcctctctcaggccccagagcctgagacctcaccatgcccccatcagagatgcaaaaaactaaacacccaactagaaatccttgggacctctctcggctgggatctcagagcctttctgtcccctacccctaccccatgtgctgtcgattttgcagatggggacaacctggggcctcccggaactctgccaccctggggaagttgggggagggccttagtcccggatcacaaccccgtctgctccccagaatcctttcctaagaatcgttgaggaccaaagttgtctttgctgacacgtgttgcttttctctttgccttttattgtttcagagaaaaatcaagttgactgtgtcaagtaacaccccaccccttacccccgtccagccatagtggctctctggagacacaggtcacaggcggagggtcccctgatcatccccaaccacacagccagggggacttgacccctgtccacccctgtctcgtgctccctcagacccccacaaaccggccaagcagtccggggaggcttcccctccacacaactcttagcatgtgattgcagatgtgaaatcaaaacgttgtttgttttttgttttgttttgattctaccccgtcggtccagtgtctgcacagacgccttcatttctctgtaaatatgtgacttggaacaaatgtttaacacaaacgagaagtggtcatgaatgcatggtgttgagatgttttgcactattctgactttttggtctctgtaaaaatattttattaacagcagacattaaaaaaagaaaaaccacacacagccttgga
